United States Patent Application Publication US 2019/0183130 A1 - sequence listing, part 19

SEQ ID NO: 2 - DNA, 21303856 bp, Cryptococcus oierenis (residues 15,493,721-17,430,435 of 21,303,856)
tgacagctgcagcccataccaatgtcagggcgacaagagaatatcagattgaacgtatggaatagaacatatacatgtgtagccagcagccaagaatacgaatacaacacgagcgaaaaagatcatgataaaagcggacagctcaccgtggcgtctcagatgggtgatacatgccattccaagaacatctattcggacggacagaggtgacatctatcagcgatccgttcccggcaacaagcattgttcaagcgacgacgaggaccacgaccgagaaaccgccaagtttgtatgccgatatcagaaagtctttgaaagcatcgaaccgtacgcgcgattggtccttcggttcgtgagaacaccgggtcgtcacgtacggcccctgtgataagaggtaccagatgtaaggaagcacatgtagcttcgctcttcatttatggccttgggatcggcgtggtccggacgaggaggggggagcaaggggattgagagggtcgagctcgagcgggaaaaactcacgatttcgagtcaccgtgatgtcaggccgtccagcggccaaagcctctgcccaggctcgaatgccgatagtctgctttgctacatggacgactgggtagatgaggccgcgttggattataatatcgcacagtgcccatgtaatgaaggaatggttgagaatatgggaatgggatcgtcctcggaaaaaatcctttctatagttcgtccgtttcctcggaccaaggtggaaatagcgtaaaagcttttacgcgtcttaagggcgaggcgcgatagccagaagaaacgagcacgatccgcggtgcgcgagaaaggcaagtcacaatcatcgatcaatacatcctgaaacctggctactttttacagcttgatagataatagccttcgacgttcactgtcgcacataggcttgcgagttcttgcgataacagcgccgaactcattgccttccttttccaaacttgagaacatggatttttcggaaaaatcttgttttctagaccttctcctcgtaatgaccggggccatccgccttgtcattggggtcactttccacaatctgacccggaccttcgtaaacccgaacattggtgtctccgaagagcagaccctgtaaaaattgcgacgatcagctagggattacgaaagattccagcgtgatcctgtccgactcacaatctcctcgagcgatttgtgcttggtttcggggaataggaagtacgacacgatggcgttggtaacattggtgacgacgtaaatcaaaaagtacttccagccgagcttcttgaatccgctgtatatagggcatgtctatgcattagcggactgagctgagtcatcagagatggatgctactgacatcggggtgatctgaccgataatgacgttgttgagctatacatagattcaacggtcagcttcggatccagtcggccgttgaactggtcaatgcttacccagttagaagccgtcgacaccgcggtaccataagctcgctggttcatcgggaagatctccgactgatagatccaagagaccggaccgaaagaggccgagaacgctccggagaacaggaagatcgaggccaacccggcaattccgacaccttggttggtgtaacttgggtcagagaacttttgagcgatacccgcctgccaagccaagaagatggccatcaaaatcgggccgatgatcaagggcttgcgtcgaccgaaccgatcaactgaatgcaggtcgggttgagcatcgtggccagcggcacgtaacaagagagcttcgaacactcacccaagaactgaataaagatccagacaacgacgactatcgataggcggcatccatcagcaaaagccgatgtttgaggcacgattcagacacaccttgccaggcgccagagattccgttgatgagcagagtgtcgttgccggtgaaaccaagatttttgtagatggtgggaccgaaatagttgctgtggatgcggttacgagacgaggtcagtttacgcccagctacaataattaaaccgaaaagacacaaacttaacgttgacacccgtccatctgttacgtggcatgaccacagtctcggtgatcagctagcgtcctccagttaccaggtgcaaatcactcactggcacattgactgaactaagcatccacacagggttcgatggatgttggcgcggctgctgacgagatccttatagctggtgataaggttctcctcctctggtttgcagcgaacgatcgaatgcgttagctaggcgtcatggtgtccactatcaacgcgtcacacctaccccatcgaatctggtccagcatttcatcgaactcggattgaacaatatcctcacgggcgttcttcctgcctccatgaagtctgaagagagtagctcgagcttcttcgtgacgcccttgcttggcgagccatcgcggggagtaaggtagaacgaacatgccgctgaatcgggcgcagatagattggcatgagcacttgccacgatcaaggcagcgttatcatactgacaacaagagaccaattgccggaatgatttgaatggccaaagggatctgaaagaggaggttcaaatcgcccgtcaatttatgcggacctatacatgtcgtaccgcttgaacatacccgccactgagcattgttgcccaagaattgacaaccgtatccgacccctacaaacgagtgatcgatgataagcttcgacttcagcgcattcacgaggaatcgagaggcttacagttggcgaccaagaacccgatcacgatcatgagctgcgtccaaccagagagcaagcctctggcgtgtgggggcgagatttccgcctggtagtaatcttttagaacaagcgcctcgcgaggtagcggttgtcgatactgacttggtacacaggtctacataggatctcggtatcagcatgggttgaccagaggcgatcgagactacgacgcatcactcacacaatcatggacaggactccaatcgacacacctgcaagagggaatgtgagattcagctcgcagtttgatcttggcaggagcctggtgcctcgacccacccgcaatgacacgaccgacaatcaacatcgcgacattcacagcaccagcctgcaagccacatccgatgatagagataatagctcccaattgaatcgtgcgctttcgtccgatccgatcggcagtactaccagcaagaagggctcccactaacgcgcgcgcgggcgtacaacgtcagccagatcgtctcgataaatatcggagcgttgtgctcaccgaaggcccctccggcaaaagaggagaccacagcctaataacaagacagtgcgcggcttagcggaatcctggtcgaggcgcggcatacgtggagagcttaccccagtggtgtcttcggtcggtttcttaaagtacgaatggaaatgaacgtaagagtccgaaatgacagagcctatgataccgctgtcgtatccaaagagaaatgaacctagagcagcgaagatcgctgccacatagttgatggctgctggctttgtgtgggtaacacgtgcgtgtctttcggctgggaggaattcaaccatgacgattgtgggtgttacgaggcgtccttgatagctatctgaaacacctcttgttctcttggcatgtacagggttcttccatcctcgtccaatatatattgaacacacctagacatcgggactgcttcagtactgccgggaccgagcaactcagcgagcttcgcggggtaagccctcgaaactcgtccgtgaaatcgacttaagatccgctcaaagcagcgtgcagtctacggtgtaaagaaatatctctttagactaccgagcaaatcagcgcatatagcccggtgtggggatctcgcgcgagacgtcgatgctgccgagcagcgtcacataggtcagctgacgcgcaagttctgatcttgtttcttctattttagggtccgatgaggtcgcttgaatctgcttcgctaatcaaggataacctgtggtgcaccagcgttgcacatttcaaggagatcaatttccgatcagtgatcggccagtcggcatggttttctcgggcatcggccatgcgaaggtacaattaccacgaggcgcttgggcaaggcgaaatatgcggagcgcgtcagcctgtgtgggtcttcaagcgttgtcatccccgacgcttggtccccatgcgtctgcaacgttcggcatgactagaaccaaaaacccaggatacctgtctaccagcgaagcctcggcacgagtaatcaaggcatggttggaggaagcgccgcttgaagaccaatctcaatagattatttctcgcacatagtcgtacaaaagccccgcacacatggaaagtcgtcgtctagtatggccgatgggaatagccaccgtatccacctggtgcctgcggtggaggcggaggcacacctgttccataagactggccatatggcgcctgtgacccagaacgaggcggagcgcctggtgcaggataagaggaatacggggagtcctgttgaggtgcacctggcggagggggtggcgcgggataggatgagtaatgggacgctggtgtcgagtaaggtgaaagggcaggaggtccgtaattgttcgttggactggtcggataagatgatttcggaggcgaagggtacgctccactgctgctcgggtaggaagagtacgccgaggatgaaccgccagacccaggcggcgggtaggatccctgttgagagtattgttgcgatgggggcggactcgaatacgagctgtatgggttcgagctggtcgtcaccttgggtggtggcggtggcaatggcggcgacatagaaacctgcctggcatctgtagagaatgccgaaggcaaattgccgaaactagcaaagtcgtatgggttgctagcaggttgctgcggcggaggagcctgctgacgcatgctagatggcgaattgcttggattgtaaccatgactgacatagggagatggcgcgggagggatgggcgaccgggatgagagagacatgctgccgagtgccgactcgagactatcgctacctcgtgaaggggaaaaggcaccggatcctcggctctcgatgttattgacagcttggttacgttcctgcgtgcggctcgctaagaaacccctgacattacgacgaagactgtccgtgagagtagtcaaattgtcgtaaaagtggcttcccttgctgttggaggaaaccgccagtgtcagatcctgctacgctcgcgatacggcagaccccactcactcgagattcgatcttgcatcgacgtatccttcgtatgccgctcggaacctcctatctaggtcgtcccgcctttgtgcagcacctcccattttcctctgggcctctcgcacaccgcgaccactttcagcctgtttgatgagagccgccatttcgtctagcaacccggactgagatgccaacgcagccgagatgcgatcctggtaaggcgaaaatttctccagttctccagcgaataaggtgccctctacaccttgactccgtcggttcagcaaaagcagatgcgaaacatcgtcggtttgaatctttgtatggcgtgccatatatcggtatgagcctcctggcatcacttcttgcctcagcacacgtaccttttccttgagatccttcagcacctcgtccctctcccttcgcaccttgtccatcctgtccacgcgttcccgtaattcggcaatgacgctttgaagctcatccctctcccgatcttccagctcgtcctgggctacatccacgtcgagcaggttgagcctagcactggcatccttgccggccgcagcatctgaatacatcttttccaagctatgcctgggtccacgcaacacgtcaacgctccattggatagagttccacgtatcggtaatggtccggtccgagttggaggcagagttgatggaatcgagatgagacttgacctgctccttatactgccgattgtgggacgaagagggggactgagtccagaggtgtccatgcttggctcgcatccgctcgcattccctgctctcctcgtccatctcacgagccatcgtctccagctcatcctgagctcgctcgcgtcgctggtcgttgcgacggaacacatcctcgataggcccatcacgcctctcccggctggttatttcctctgcccagcccgcgacctccctcggtaagcttccgttgccgccttgttcgccattctgtccgtcgaggatacccatgtatcgatggatccgctcccttactcgcaaatcatctaggccggctcgggtttcgctttccccaacatcacatcgttcttgttcggctcggaccagtttagccttttcctcagagtaaacactggccttttcgtgcacctcgagaggaacaagccggcggaagatgtcgggtccaatcaagctcgagacggcaggctgagcataaatttcctggatggtaataggggctgccagaccggccgtcggcaacggctcgatagcgggcaagctcgattccgatggtgccaacgcgtggtatacgagatcgttatccttgtccgccgtcgtcttggcctcggtggcgaccgtcaagtgcgccttagtgatctccaacaaagccgtcgccgcatcgaagggtagcgtagaatgagcggcaggtgcctcttcaccccacgatacattgccggtcaaggctgaactcgacgagctaggcgtataattgtagttgaactccttggccagtttatgcgcttcgttcgccagcgtttgtgcgatcccatagcggacgagaccaggaccatggtcgcccttaccggtatcaattccggcacggtaccactgagagagggaagcgaaatgtttggccttgatggcaaagacgttgacccagttcttgtccaggatgcctttaccctgaaactctttggcgtcttcttgcaaggacgagtagctctgcgcgacggattgacacattttgcagacgatcgccacgggcttcttctcgctgatgcatttctccaagaaagtctccccggcctgggcgatcatcaatttgccagagagcgagacgacctctcggctcagatcggtcgaaggggcgtgcaagaagttttcgttgataaagttgagcagacccgccgcttgacgcagcgatgcatatgcccgcttgacgccttctggagaagtacgtggggatgtagctccgaggtgagagagtacggatgacaataggtggagtatggaggccttttcgaaagctagcgaggtctgagtagtcggcttgtgagtataggcgtcgtccctttgaccaaaagcgggtaacatcagtaccatttctgcatatatacctatagcttcacttaccacgtaaaagagatcttggtctccgcgaacctcaactcgagtagctctagttggccaaagtacttgaacaggagatcccgagctgtattcaagcatcgacatcagtactgtccacctgtatacaaggcacatttgaacagccacttacccgtgacatcactccctgctcccttgactgcatctcctctgcacctggtcaaggtagcaatatcctctgcatagccgtcagggcgttcaccatagacttgaccgatggtctgacgaatcggggtcgcaaaatcggtctcccccgtcgtcttcctcggtagagatatgaaggggctagtatgtgtggtcatcttgatcgatgtagtgaaccttacgacatgcggtaggtcttgaacagattggtccaggagttgatgctatgtctagatcacgttgaatggcttgttgcagctgagtgaacgtgagtgagtgatgcgtcatcgagcatgagcctgacacgtaattttttcaaccaacgctcggccaagaccgagtttcacaaaaacgatagttttggaatgaggggtgtgtgacgatcgctgctgccgttacatcccggtatatttatcagacttgggattgcacgaaacaaacaacctcctaacagctttttagtcgatgggatcttcctgtcactgctatggcttggatttgaccagactaacgtgcactacgttgatgtatgcattgacgattaaagaagcgttatctgctagaccaggaagccggaattggaggtgcacaactgaccagaagataaacgctggaagcatgaagatcgaacagtcgcctctctcgctcgcagaatgtaccgcgaccaatacggctggtcgatcgaacggaaatgattgcgcgttctacctcaaactatcgccgtctttctgctcagtcatgccggtccaagattctggaatcagctcgttgagcctgattgtttgaggcttcgagatatgacgtcttcccgctttaacgacgcccttaaatggttagaactgtgctacttgcatcagaggtcgaattgcatttgattccttgaaagccatatagacgtgagaagcacgcaaaaatcatttatgcagcggcgggagcgctcgcaacacgctgaggcatagagcaagctgagtttcttcactgtggaacctacgattcggcaccgtagttgttgatatcttcgttgtatgcggtgtggttacccatgtcaatcctgcgggttttcgctcaacccacctagaagcgcgtatcgagttgccggtcaagcgcgcggcttcttcccccctggtcctctgacgaaagcacttgaaaggcatattccatccatcgatctaccttttcccattgtgcgagatcaaggtcgctcctgcaaatacacaaggcttctttaatacaatgtgagtgttatcagtcctctcctacgtatcttccatcctgcttttggccaccgcttcgtgatgtttcaatacattatctacattgtccgacaattacgtggagacaacccatctatctttgtttattctgatcaagccaacaaccgccgctatcttcgccttgacccttccctttcttatgttccgcatactcaaagtgacatgcagctaacctgtactcctgttccttgcggtccggtccagcttacgaagtggcagtggccgtattcggagatacttgacagactcgtcagtcactctttccttcttttccttttgtactgctcctatctctatgtacatgtcattgaattcgaatgctatatcacaggtatcgactccggtccaacctctccccaaagccttgcgagccgtgtccagattgaggaatcggagtaacaggtgattcatcatggccggtccttctggaagtgctccttccgttaggaacctgtacagtaagtcgtgtacgattgcatggcatcgcatacgaggtgcctcgttaagcttcctgttcgtgccagccccacctcaggaagaatggctgttcctaccacccacccctggtcaaccctcttccaaccctacaacgactccatcatcgacctacaactcgcctcctagcggcagcacgagcggggctgcttcttcccctatcgtcggactcgagatcgatcccgatgatgagcccttcacgatgtatggtgtactcgccaccttcgcttcggaatacctgaccacggctctgggtatgccgttcgaagtcggcaagaccttgttgcaagtcgaatacaagcccaagccgggggtcgacgatggagccgagattgagggcgtcgattacgaggccgagacgaacgataccgactcgaatgcgggggatcaaccggagggctcgaggcgacgtagggattcgattgaagattcagtaggtcacttgctgggcatgggtttggaagtagacatcaactgacatcccacttgttcgggtacagatccggaatcccgaagacgccgaggcctacttccaagacgtcctgtcatcgaacactcgaaactatataccaccggtagtagacaacggagagcaaggggatgcggagggttacttgcccgatcgtgagtaggcttagtgtctttgactcatgcgcctgtatttaccgacgctcgttgttgtcgattacgaaagtcccgccctcgtacctcttgcggacggacatgtcgccttcagggtcttccggcgtttggggaatgatgaggcgtatcagaaggacaccttcggaaggactgccaggactgtggaagggacaaattctgacgaccatgcactcgctactctcgaacaacctgcaaccgctcgtgcattccggtctgatcatgtccctacctcctccgtctgcggcggcccagatggagctcaactctgacctggacctaccgctcgcatcctaccacaacccgatgatccctctgggtctgcatgtcacggcccacttgttgacgcacatgttcctgtcacccttggagctcctgcgcactcgactcatcgtccagccgtcctcggatgccaaatccaagtcttccatcggtttgctcaaggatgccgtctcggacgaaggcggggtagctcgcttgtacacgcacccgcaactgttcatccccgccatccttgagcatacgttgcgacccatctttacgctttccatccctctggtcatcgagcgcaagtttgggatcactccggacggttcgcccgtgacgtattcgatgctggacctctcgctcggtctcgcatcattgctcgtcattctgccgatcgagaccgtcaggaaacgattacaattgcaagaccgcatgtccgagaccgaggcgtggcagcgaggaggcaagcgagagaagcgaaagtcggttgtcagacttcgcaagcgcgagtaccatggtctggtcgataccatctggaggatcatgtcggaagagactgggacgcccaagaagaagcgttccaaaagacgtggatctagaagcgagcatacgaatgccgtcgacgagcatgagaagcagagagcggcctttgatggtatcaagcagctctatcgaggagtaagtccgggaaatctcacgagacttgattccgaggtcgttcggaggcactgatgagacttttgctccactatcgcgataacaataacaacaacaacagtttggaatggccgccggagctcatctcactgtctttgcattgggtctcgtcagcgccggactcggaggcaggtccattgaatacggatggaaggaaatctgatgacgatgaatgacgatcgacaacgtcactgactgtctgtttgtatgacaccgctctttgccctggatttatcatatcatcgttgtaaatgaaaagaatcgcataccggactatttaccggttgtcaacgtatacactgtgacaggggcccttctatcttgcacaatttaccggttggactttgctgcggtagctcttaaaaaagatatccaacttgcgccacctgacgcgtcgaatggtgttgtgttgttggggcgacgctttcgaagcgaacgcatctctcccatgggtgaactctgacaagcgcgtttcggaaccaggggacaaaaggagagcgcgctcattcggtcatcggtcagatccgtcaaatgcactacgatcgagcgattgcaccgggatcgatgctagggcagagtagatgtcccgacctgttcgctcgtgccgaactcgtcggtcgtttcagtagtgctctcggctacatcgattgttcctttcacaccgagaacaaggagatcaaccgggctcgatggttgtcggccgaattattgcgggacggtggatatcattgcatcggtttctatgacggtccctcgaatcttaaagcttgactttgggactactagccctgatcgtcatcctttgcaaaccatccgctgatcgctgtggtcagggacaatcccggagttcatggttacagcgaggtgttgatcacgggttgacctcgtagaaggaaaaaaaagggtacttgaacattgaaaaagcccgaaaggcggaggcatgcgggatgtcacgatgttcagaattctcagggagtggagatctgggctatggtgatctatggacggaccacgtctgatgggtgcgtatcgacgtgattgaccgagccgggacctcggccggtggcccttgcaccagtcactcttcccagccatggtcacacctgtgaacaaaaaggggacaatgacgttagcgcgtcgcgacaccgaatggaattgatgggtgatagaacctgcctggctgtatttgggcgcgcatggggggtgtcgaaggcgtttttcggtggatcgacccctgtcactctggtgcctcgccgatctcttctcgatagaatggtaacgtcattttgatcaacccgcgcgtcagcactgtcgtccgcggctgctagtttcgcgagcgagcggtggcttgtgccctcactctcaacttgtcacggcggcggtcgcccaacgtattctctggaacgccctcgatcaaacacgtccatcggtactgaggcatattttgtaaacaaacagacttcaaaccgttccgagggcggtggcagagctcatgcccgcacatccctgaacccaagcggtctgtcacaatacaaggttcggcttgcacattggtctgcggacccaacgttcacaaccgcttgtacccacggctccatcccccattcttgctctccggtagtagctctcgatatatatctcgacctcgacctctcgagcattccattcccattatcgacccagtctcgatcgccatctccatacagtttctcatgcaaccacgacactcatagacataaaacttcagctcttcagctagaatctctcttcctggtcctcgtctcccgtctcgctctttccgattctcgccttttacgacgttccggcaaccacctccttggacacactctcattccaacacgcgacgacaaacctcactttccctcaatcatgtccaactcggaatgctacacccctctgcctcctcttgcttttgaagaccgcattcacccggcgtcgctgtcgaaatgcggcattcacgacccggctcttctcgagtttattcgaacagaggtctcgcgtgaattgatctgtaagtcgatgcaacagttctcattctaccgcttcctctccatggcgcttacctgttgccctccacagactttttggccgacaagaccaacgagatcatcaactcttgccagatcgtccaggtcgacgcccgaaccggtcaacccatcccttccccttcgatcgaatcgatcgaagccgagctcgccgccctcggcctgcccaccctggacgactttgtcgcccacgttatcgagtcttccaacgttcaaatccccaccctcatcaccaccgtagcccttctcgagcggttacggggccgtctgccaaaggtcgccaagggtatggcttgcacgagacaccgagtgttcttggccaccttgatctgtgccgccaaatacgtcaacgactgttcgccaaagaacaagcactgggtcagtccgcctcggatcgtttcttgagcacatgtgcttatccttttggtttacgcgcctctagtctaaatactcgagcatcttcagcttgcccgaagtcaacttgatggagaagcaacttctctacctcctcgactttgacctgaacgtcaacgagaccgacattgtgcagtgtaaataccgtgattgactgaccgacgttgttgcaacaagggctaacgacatcctctatcagactttgagcccttcttgtcgcaatactgcttcgagccttcggcgccttcctcgcccgtcgtcgagcagacccccgtgctcgagtctgcaccgatcatggcaactattccccaagagttgctccagcactctggccgcaaggttcgcaccgtcacccgcggcgacgtcacctatacccaccctggcatggaccgatcggcctcgtgttcttcgctcgagtcggtcacgtcgaccatcatccagacacctccgggctctcccgagatgcccgcccgcatggcttacgccaagcccgccgtgcacaaacaagtacaacgtatctcgcctctcgagtaccaggtacaacaggtcaagatcggtgccattcacccatctcaattggccgcaccacctcccgtcactatcgctggagaggctcctggctttctcgagcgattgatgaggatgcacgggcgacgcaagcctgtacccgccactcagagctacgacgaggtcgatgctatgacgatgcttgtccagcatggcatggccatctagacaatcgccaactaaaacaacaacaaaacaaaaacatccgggctctttcaccaatcgcacgctttcgcctagagtcctagcgacactggctattttcccagggcttttacgaccatcgttcttcacctacggccgccaattcatctgtatcaaatcagggtttctctcggacaatttccaacaggtgtagcaatcacgaacttgtgtatatagaagactgttcctccgactttaggccggaccttccactcgctttacgactctctctttttgggttttcggtagtcacgaaacgaacgctgtaactcagtagctaagcaaggcttgatgccgccgcgatttataaaggccttgatggccaaaccaatgatatatcttgtcccgttacaattcaagccagtactcgagtcgatacaatgcggtactttattgcccacggccacggccgcgacctctccctcggcctcgacctcgaccggcattcggccgatcatggctgtacgggcgttcttgtccattgttcatgccagatggaggtccaccgtatgggggcatcggaaaagactgaacaggaccccgcggcggtgtcatatgctggtggacaataggagggcttccgccagggatctgagccagtctcgaagggtgtattgaaggggatggtttcgctccgacggagctagttgcaagcggtgactggaaggcaacaggcaaagagggagctgcttgtggaggaccatgatgagggaatggtggcatttgcgaagggtgaagtgtgcctgcaaagggcggcatggacgacggcatcgcttgcggctttgggtaagggagtgagcccgacatcggattcggtacgatcgtcgatggtgacaaatcaggagtcacctgcccagtcgcttcgacagtcttgctgaagatctctcggacgttcgtattgcgtagagtctcgagaatgctggcaatattgttggggacactgggttgtgccggcggtgcttgagccgccggggcttgtgtagtagccggaatgacatcgttttttgatgggttggtcaccggaatagagggcaccgggttggaaagagggattcgattgggcacgataattactgcgaggaacatgtgcttgtcgatttttttgggcaagatataccggtccatgaggtcgataaagctgtactcccggggttccttgggtgacatcgggaccatgtagatttctttcgggtgtccgggaatttctctagtacgctttgggatatgaacgccatggcgtctagcgagacagattcagaggcagagccaaggagttgtttcatgcgagcgactcactttctcgatatgtggaacgctatgagcttttcaaaggattctttgtcttctggcgtgtcaaacggagtcatggcaaccacgacgaggtccttcctcttcgacacatacgtggtcgataggtagttcgacgactgattctcttcgacacgcccgtcgaattctatcggattgtctactatcaatcgagaccactcggccgcgtcctgtccaatatcgaggcctcccacagggcgagcctcgactcgtggatacccatcttcttttgaggcggagttcacaagctgattggccgcagtcgcacgatcagtcgcctatacaaatgatcagatctcaccagatcactcacagatcccgaccaaaccaccggtagcttgtcgaggatttcctgtacagacggctccgcgggtgctgctaccttctctgcctctttctctcttgatcccgagtaatcgatctcggagccattatcgttttccatgttttcgtcgatggacccatcgttgaaacctcccgagccttgatcatcctcgtcgtcctcaccctgtggcagggtttcgatcggcgccgagggatgagtgccccagactgaagtcagggagaaggaagattggcgctgctgagtctggacaagttgcggtgcgggccgaggtgtctctggcgcgggggccggtttgtcaaggacttcaggggttccaacacgctctctggtgtcacggtcgtcgccagcgtcttcggggtcctgttcctggtcttgagtgccacgcagctcatcttcctcggtctctcgctgcgcttgcgcgtctaccacttcgcgctcgacctctttttcgcctcgttcccgacgagcgctttcagcaagattgtcatggatggcctgcaaggcgtccgcgtcttccagattctttttcgtgtaccgggctggtccgtaatcatcctcgtaccggacggttgccttgatgctctgcgcatcgagcttgttcatctgttccagtgtcgtggcggtggcgagatcccgagaagtcatgtcggcgactgctctaggggatattcgtcctgtggaaaagccctcttcgaggtcgggtcgtaggtccttctccagtgccgtattgatcagcgcagagaaggatctgcgattgtgcaaactcctgagcgatccgacctgcgaccgcattgacagactaacacgatccacttacttgtagctacttcccgcttcaaaccgggacccaccggccgcgcgttgctttctcttttcgtacactgcctcttccacttcagcagcataagattcagcccgcttttccagttccgccttttcctcttctggcacttcgacttgaatctcctccggagagacgtcgtccgttgcgactgtccgctcttccacgtccatctcctgtgtgttttccgattgcgcttccgtgacatctcgcttttcagccttttgagcagctagagctcgttctctcagttggcgctttctatagtcgacaaatacggtcctgaatcccgacttgaatttgttcaagaagaactccctgattttgcctgagccgacctgtaccggcgcctcggccgccgctttcacagaagaagcgggcgcggcagctgagccttttctccgggaagtcttctgtttcgagggtgtattggcgggcgaggtagccgatcgcctccgtttcaactgcgacgttcgggcctttttggatggtctgtccgtcgatccggcagccgagacctaggatagcaaagcggacgaggaggatcagctttgtcgtcatcgtgtgtagcgtcaatgccgaacattgacgtacctcgccatcactagcactatcatcctggtcgtccccttgcccggctttccgttttttgcccttgcctttacccttcgtcaccccgtcctcgtcctcgtcatcatccccgtccaccgcctttgttccggtctcaccgccataaacgctaccctcgctatcgctttcgctcgcatcgtcgtttgactcgggttcggatttatacctcttctcgtcctcgtcctccttgttctcgtcaacctcttccttgttctcgtcgtccaattgcataagcgtcccgtctccctctacgttgaccggcgtgtcagtcgtactctccccagtcgcacgttctacctcgctcttcttcccccgtccccgccccctgggcgtctgggtctgggtctgggtctgacccttcttcttcggcctccccttggcaggcgtcttcgaagctgtcggcaaggcggccgatatcgatcgggctggagaagcgaggaggttgatgtccgaccttcggagggtcttgcgttccccgttggtgttttcgtgacattgagggcagatgtaggtctctatcgtttcgtgtcgaggtcgaggtcgtcgggggtcgggggtcggggtttgaaatcaggtgagatcgggtgcatgcagacggggggatgtcggtcgagggctcaccgatatcttcagcctgagcttcagtcattttgacgcatttatagtgaaacctatttgaggggatgacgtcgcaacagccagtcgtcgaccgagatcagctcacgcctgaccacgcctgaccacggctcggctcggtcgacttgccattcctcgcacgcatcacactggatcatctttctccctccctcgggttgtcggcaggtgcagtacaacctatccggatcgtcttcctcctgttcctcctcatccttgacttgattctgctcctcggttccagcctgcgcaggatccgtaggacccgctgatttcttgggtcgacctcgacctgatttcctcggcgtggacgaaccgctcacagcgggcttgacatcctcattgggagccgctttacctctgcctctacccttgccattccccttccccttgacctggggtgaagaagcggaagaggggcccgccgtgggcgtttcctcggggggtgcgaccttgagcgtaggtcgggtcgtccgtgtgctctgccggatggacatgctcggtctctctcgcagggccccgcgccaggttttgtgtttcgacgagacccggtgtcctgggtgacgacgagtgtcgattgatacttgactgaaggttaggcgttcagagtcgtatgattctaaagtgcaaagagatgtatgttttaccgagttgatgcgtgttgagagcaagttggaatatgacgaattggcgcaaaacggcggtgaacgagaggaagaagagacacaaggtcgatcaaagggtaatcatccaaggaataaactactggcacaacacggaacacaaattcggaccactctacgaactgacattctagccatgacatgcatacgatgagaccatggtgtgattacgatgtatagaaatgcgatgttatattccccccctgttccccatcatcacccaacttgccctgtcctggccccgcgcgctttttcttggaaaagcaattcgcgggaaaatccaaaagttgtcaagtgaacagtgaacaacctcgatacaaacagatgacatcgatatctatcacttcgactcgatcatctcttgcctcatagtatcatcacaaggatcaagaccagggacagagtgttgctcgccatgtctttcaaatcatccatcaaaaccctccggatcgtcgcagccgaagcaggcgagtcgagctcgatcgcaagcacgcacgcacgcacgcacgagacacatcgctgatcattctgctacctgctaccctcctcacaggcccatcgacgaccaggacgatcaccacttcagcacccgcctgtatctctgctcagagtcgcaagattcctgcggccaagcgggagaatggcgaggacatgaacccgcgtgaatgggcggaacagttgaggaacgtcagggagtggaagagcaagcaagagtcgatacgtgagtcctcgtcgcgccgctctttcgcatcgtcggcggtttgggacgtcgtcgtgctgatgcgcgaggatgaccattcgctgccccaggtcaacagacgtcgagcgtccgaccgcctacctactcgagcctcgcggccaaatcgtccgacccgagcgacacgacgtcgacatcaccccacgcccacctcctttcccaactcatggcctcgaccgcccacctcgggcacatcccctcttccctctcccccgcctacatcccttatatccactcccgacgagccaatatccacctgatcgacctggaacagaccgtacccctccttcaacgggcgagcgagtttgtgagaaagaccgtcgagcgggacggctcggtcttgttcgtaggcacgaggaagggacatcgtggaatggtcagaaaggcagtagagaggttggaagggaacgggtttggggtcgcaggggaaaggtggatgccgggaacgttgacgaacagtctgtcctagtgagtacccccccgtcattcgtttacacctgatcccaattcacccaagtcgatccgatccgtacgattgaaatggtcaatactgacaaccccctccgcagcttcggacctaaacctatccgagccggttcccacctccccgacatcgtcgtcgtcctcaacccttcggaaaacctcgcgttgatcaaggaatgcaacatttcaaacatccctaccatcgggatcgtggatacggataccgacccgaggatcgtcacgtacgccatcccggctaatatggaggtcagtaggctaggcagggtcgtgtcggccgtttcacgtcggtcgaaagaagagggggaggctgacgagtgtggtctcgacgttggttctttttttctcttggcctcgtgcacagtcgatgaggacggcggaattgatcgtggcaaccatctcgttggcgggtcaggcgggtcgggagaagcgattgaggaacagcgcttcgagcaggagcaggcgatgagacgggcgcgggggatcacgcaaggatttgtaatcggggtttcatatcgtttggtactcgcataaatatgcatacgggctacatggagcacggtaatgctggtcaagtgggcaatatagctcgccgaggtcactgatcgctgtcgtatgggatgcagcaattgattattagcctttgggaatcaagccgctcaatcaattccgttcagagtacactgaaaaaaactttcgatcccgaatttaccaaggcagtcaaaggtatccgagagccgaacaaaaaaggtcataatcaagctctccatgatccttagcatcttggtaagtgaccaaataaaacatcgacgggacgatccatcgtgatgcccgtggatacagatatcaacctcgaggtatcgcgtcgatcctagcggtcaaatccgcgccattctggacgcgatagggaatctgtcgtgcttcgccgctggtcgatctctgactgactggggcagtcggtggttcggctcgtccttctgcacgaggctggcacaaaaatgcaacccgcaatcagtgttgaaacgacgttggcgacatcgctcaggggtgcgaatcgcacaagccgaagacgctcaaggaagctgctcattcagcctttgagcggagcgcacgcagtcgaggccttccggccgaatgtatgattcgccttggcaccggaacgacatacgattctggattgcacagccgagcggttgaaacgtcttcccggccgagtcgtcacgaaaagtgattttcacgtcgaaagccgagcggaattggggtggggggtggggggcccccaccacctcctgcgccatcggcgccggtcctccgccgccctagcaagcggttctccaagaatccagtcgccaatcaaggagaccgtcgaaatgacgtcgcactgaccgctactcgcaagatgaagcaacttcaatgggaaaaggtcaacaagtccaatctggaaaagaccgtctggggtcaagctcagcagatgccccaggaagaatgggcgatgaagctaaaacgagtggatgtctggtcggaaatggaggacgaattcaaagcgagagaggttgcctacgatgccgtcggtaagctgaatcgtgtggcttcaatcagcctgagttcacgagtcctcatatacttgctcctgcacagcgaaacgcaaaaaggaggagctcaagagtgtgctcgagccttccgtgaggaagcatgtcggtaagtcccccaaaaataaaaatggcgagcccgccgatcatggctcataacccacgaacccaccaatagagattctcatgaacaggactaaaaggttggagccggagcaactttgcgagaagattgtggcattcgacaaggaattgtgcaatgtgacgttcttgtccgaattaaacaacctgctacccacacctgagcaggtcagtcggaccaagccaatttccattcgccagcccactaacgcccgcgggccttgaaattgatcaggtttccatgctgaaacagcatagtgcagagagtcccgaggaaatggctctattgcacccggcagatcggctcatgttacgtctgatcaagataccgcatcttgccgacaggatcaagggaatgctctatcaagtcagctttgacgagacagccggtttgctcgaaaaggtgagctcgatcggcgtggctcccaaaaaaatgcacaacccctgactatgcctccatatccatttcagggtatcgttttattacaagacgcatgctacgatctcaaacacgccactcagttcaaggcacttctcaatgttattctgatgatggggaactacatgaacgggtcgaattacggaggaggagcatatggattcaagattgccagcatcaacagggtgagttgagtgtctcgcgagtttacctactcgccctgaccttgcctttgaaatgcagttggtggatacaaaatcatcaaatgggcaaaatcttttgcactttttagaaaagaccatctcgacccaattcccagagatgcagagcttccgcaaagagctcgaaaagccggctgaagcgtaccgaggtaagacgatagggtgacatcgtcggcgttcgattgcgtagctaacgagtattggcgttcacagtgagcttggaagagttgtctgctggctcgcgcgatctacataccggccttcaaaagattcgccgcgatctagaaagtcgattcctagacgtgaatgacggctattcgaagaggatgttcccctttagcgctgctgccgaaggcagagtagacgcgttaaaggatcaggttcaggccgggatccgggcattcaacgaggtcaagatgtattatggcgaaggggacgaaaagtacaacgctgccaccaatccccttgccttaggtcggcccggttctctcgagttctttggcgtgtttaagacattcttgacctcatacgacgtgagttgcatggcggcattacgacggacagcgtcagctgctaacgaagctattccgatgcagttgtgccggtcacaaaacaaggctagggacgatgccaaagcggcgctggatcggcgtcgattagcagagcggaacagagccgctgctatgacgccgcaaaccacgggcgcgagtgtgcatactgaggtcggagcgatggacgaattgcatgcgcggcttcgtatgcaaggcacccctcgaacgaagcgctcggataggcgtcgggctcgagagctaccttccaccccctccttggaccgtttcgatatggcaacctttgctatggacgatgcggcggatgacgatgcgaccggactcagtctcgccgacatggctgccaagatgctcaatcaactcgaggatggttcaccgacgcctccgccacgtcgtctgaacgcgcccgagaccatacgagaagaggccgattctgtgaaaattaacgtcccggaagcatcgcaagccgacacgacgatattcgacccggttgaactaccttcgaccccagataatcgaccagatccggcgtccttgattacaccaccggacaagcgtacatcgaatttcccgctcggatttgccgtacggacacttgacattgacagcaccgtccgactcgaagccgacactgtgccaacagaaacgtctacaccaccatagatgcagattcatctccttcgattttcgccgcatgataacatgaccgaccaagacgacacttgcatgaacgtttaccttccttgacgaccaataatgacgatctaatgtagagcgaaaatatatccagtgaaacagttgtagttgggcgggcgcacaacgttcccggttttcacatgacgacgtatgagtgatcgccgcgagatttgcagataagatggcgaccaccgaccaaagctaccaattcagacgcatggaagcggatttgacctttgagaagatcactaagtttcgagaagcattcagagaacactacaggccaatcaccgccaaacaggtgctcgaggcattggcagacaaaccggacatcaggccaccgcttgtgttttcggtcgcaaaagtactttttgacagcctgttctctgcatgtgggcacaaagaacaaggggaaggcaagaggggctggattatgaatctgcctcggcaagtgttcgctcaaagctgttatgtgatggtccgggccgactcaagcatctcctcgaattgcgttgtgtcgcctccgccatcttcttgcagcaaggatctcgtccgcattctcttatttacgtgggaagtcttctccttgtcggtctttcgtcgaatggatttcaccgcagcaggatttttggcaacgagcacactgatgacccttgagcgcgttaaaggtggaaaaatcggagagggcttgacgatcgtcgcgtaacgccctgaagatatagatgtgaagttacatcgtttgcactcccaccgctcaaacgacatcgtcgacgtctcctcgatgtacccctcgtcctccctcccctccacctagtccgcctcttgtccgtagaaaaagtctaccatcggtcgtacgcgcagcatcagggcgttgaagaccggattcgttgtgttctgccggcagacgaggtgctcttcagcgatcatagagacagacaaatgctagtagagcttaccacacgattggcatccccgccgacagccaagaagctctcttcgtcctcgacccaacccctagaatgtgcccaaatggatctacgtcgttcccgactctcctgctcggtctcacccgtccgttcggacagccacgagggacattccgaggacctccactgcgattccaactctcgtactttggaaggcaggtgtcgaacgaggtgttgtgccgaagacagacccgaaaggttgttggcggtgtgatataggtctggcgacctggaagggagtacgacaattcagctttttggcctaccagagatccgcaggcagagcgatgggaccgacttactttccgggcttgtcccgcaagcctcccttgtcactctgtgcggcgatcaatatgtactcttgcaacgccgtccggttgaacagcatgtccctgccgtgcacctcttcccactctcccccatcgctcaggacgtaatccgcacgattcttctcgtcgtcgatgacctggctttgttccgtctcttcgccctggaccacgctatcgaggacggcgaacagtcctccgacccaccatccataacacccgtcaacgagcttgttcgtcctccccctgaacccgcctccttcgaccgcatagctctgctgcatgaccccccaccggagcacggcatcgacatcgatggagccctgtcgtttctcatgctccgtcatcaagggctgtaagaggaaccaggagaagacggcgcaggaagtgtatcctccgtgagcttcggccgaagctgggcagatggaaggatttgatgaggggaaggaagccgaggcgaatcctccttcataagtctgacagctgaaggatcagtcgaatgggtggcaaggtcagcccttggtagcgggcgaatctcgtctcgcgtacggcctactttttcaaaaagttcgacgtccccgcgacgagttccggcgtgagcatgtctagcagagtagcacagacgagtagacaatagatccccctaacgttgcgagacggaacgaccaataaagtcagcccggaagatgtcacgcgcaggttcaaagactttagctcgaaccccgactcaccgaacatccacctcgcctccttcacagacaacgaacccgccgtcgggccgtttacacttcatgaaaaactcgtacattccctttctgtccaacctcgcccacgcctttttccccatctcgctcgtgcctcccgtctttttcgaatgatccccacagaggatggccagggacatgacgctcgcgtacgtgggcaacaggtgcgcctgatgtccaggaggaggtcctccacagaatccgcctcctggatgttgaaacgaaaagaccgtctcgatcgctcgtcgtttcatctcgtcgtccaacccgatcccgaggaggtcgaacccgtgcaacgtccagtaggtcaaccagggccgggaagcgtcgagcgagatgtaaggagcgggaagggagaggaggtgtcgaccgaggaaagaggcatgtgcggatcggttgagcgtcttgggaggacaggggggagaggtcgtcatggtcgtcgtgatctttcgttcagtctcggcctacatgaccgacggcagacaacgatcgcggtccaagttgaaggttgagattcagggaaatgctttcggtgtgtcgtcgctcgctgtcgatactcacttgcgacctcgacgtctcggtgtgcacgccatcatcggggtaggccgtcatctcttgtgtccagatcgaagtcatggtggtggtgggtccaggttgtcacctgcagggttcacctgtatgtctatgataatcgaggcttgatatataggttcagagtactcccttgtacgttgtggtggttgtcctcatctactgaattggtcgaacaatgaatgacaaactggatgtcaaccgaaacaaaaggagtgggagatgaggtcgaccctcatcggatgtatctcatgttatggacggaagtaaaaatgccgtaatcgtgtctcggatgtaaatataacggcataggaagcaaatgatgatcaactttctctttgttgggaagaaagcgctcgctcgcgcttgggaacccactcgcactcaaccttgaacgagcatatacttgatgatcagttgtgttgatcgagatgaggctagtcattgcggtccgacaaacagctcgtacatccgtccacgcctttctgcaaggaccaagcatcatggcagccaaagccaaagccaggcgagtaccgcctttcccccactccacctcggcctctagccgaccgagcacgatgctaacatgccacccgggactctatacaggaccgtgctcgtcaagctcgtctcgagcgcactgacgggttacttttacacgacgacgagaacccgattggcggacaagttggctttcaggaaatacgatcccatcggtcagtcacacccccccccccccacttcgtccctacactcggccgatgcatctcgtcgatctttagacgagttggggcgtatgcgacaaaggccagctagctcatccgggtttgcttctcattttcgcacctctcgcagtccgtcgacatgtcctcttcaccgagcaaaagatgaaatgaacaacccccggcctctcgacttttctttcccttgcatatccatacacttttacatcgtatcgacgatcggcggtctcgacatgaactcccctcacgcgatagcctgtacaccatgcaatgccaacttcgaacgtaacaatataaacatcatgaaaatccccgtccattcgactcgaatgaattcgaaactgcgagttatggtggggttcggaagacggacatatccaggtcgggggagcagcccggtggagacactttacatgttgacggaccggctcgaccctggcagaccgtgggaggagtcgcagggtcctctctttcgtgtggatcaagtcgagatcgagtgtttcccgccgccccttggctatagagtacaagatggacgacggagagatgatgggtctggtgataccatcaaagtcgattaggaatcccgaccggccgtgacctcgtcacccggccattggtcatgatcgtgcacgtcgggtcatcccgtcgtcgtgctagacccttcgagccgtccgacctcgccgtccaagatcatcaggcggaaatagtcgtcttcctgctcaagctcgtgctcaacctgggttcgatgctctctaacgccattaatactcccgaatgttgacgggtggtccgagactcagagtatttagtgaataaggacgaatgcgcagataccgaaagaagacggagaacgctgggtctgcccgtgggcaagttgaggattatgactgcatgtcctcatgctcgcccctttttcttcggtgaccctctcggggttccctagggacacgctctctctagattaaggatacatgattcgcctcgtctcgtccaggaagacgcctattacgcatgcacatccgtccggaaacgccccatctatgccttgttcttctgctgagcttggtatcggttgtaaactgccgaaagacgagaaagatgaatcgttcagcgggatgagaatccggcccaaaggaaaggtagctaccactcacgatcgtcgttgattcccatcctgttcctagcaatctattcatcccaaaaaatcccggacgatcagccctccccctcccactttccccgttgcgaccgactctgcggcgcagggcggctcacctcgatggcgtagaattgtacgcgggtgacgaggatcgagttgtcctcgtcgtattcccgcttggcatctccacggaggatcgtaccaaagttgtaatcggggacgagcttctcgtactatcacatcgcaggtcgagcgtgtcgcaatcgacgtcagtaccctttcgtccggtaagcaagggtggtagctatgacgaggaagaatgaggatgagggaggcaggactgaccttcatgataaagttcctccatcgttctttaccctgagcgctcttcatgtcgttctcgttcagcttggtcaacgcttcgacgctgttcagctcggggaaagtctgttggaaatcctccatgatggcatcgtccatcctgcgtgatgggggaggaaggagcgtacattagccttggagcacaacgatgagcaagaagtgggcgttcaaggaaggactgacttggtgagcttcagggtcgagggagggatgttgaggatgacccgttgataagtctgccaccgcgaggatcatctcggatcagctttggtacggatcgatcgtctgcaactccccgtgcttacctcgaggtgctctaccgtcttgacggcgaactgctgctcgatctctcccatgttccccaaatcattagggttgattccgccgatagacatgttgggcaggctatacctgtagtagcgagtcagctgcaactagttgcgcatacatttacttgttgtacttactatggggtttgattcaaacgtaaagcttaagtgtgcagggtaatcctgttacggtgacggactcgagctagatctgtgatggagatgtgtgacgaatggatgatctactcttgctctcgagcgaccatgatcttgtagatttcaacgagaatgtcattttaaattcgcgtcgcctcttcttcctctactcggtacggttcgtcatatccctctcgtttcagcctaccaagcaggtttgtttcggcacaagatggtcgtttacgtgagtttttagggaccctcatcttgactgtacgagacctgaaacgatcagccgtgacaggttcagaccgattgtcagaataccatctctgggctggttcggaacgtggctgagtactaaaagacaggtggaaacgcgattactttcgcaagttactacacgattacctcgcctgacacatccgagagaaacaagcaagactgcactcagctaaacgataaggtatcatcgcagtggcctagattgggaagggcatcgatcgatatgccgtcagccatgtcatacgatagtgccttgatcacacgagtctctggaacccgagccgtctcgcgtctcgacctcgtcatcgaagacatgtgcattctggagcgtcctgtacatcgaagctgacctccttttcttcgtcgcatggccactcgctatgagatggcgcgagacatcaaggcgcaggtcaaataacattctcgctcccttagccgtcttaaccttgcccagggtttggacattgagattcgagctatgcgcatcgcccaacgcgtctgacgacgtctagtaggctctgacactagatatatcccacgagcaaacaaagaggctggatacaacgaacgattccccaaggtccaacatgatggacgtctcctccagggtacgaacccggccgaatacgaccgctcagaccacgctaccgccgatcccgatcttggctgccaacgcgcggtattgtaccgccgcgagcttgttggctcggagcatgaggatgaagagtgagacgatgaggaagagcgtgttggtcgtctgcaaggaggacgggaaggggtatcgtatgtcgtgaacgaagaagacggtagcagtcgatcgatcgggtagacgcacaaatcagcgggggtgttccgggaccgacaagacatctccatccggtgaggatgcagacgagggagggggggggggcactcacgacgaactccccatactcggccctctcgagcgcgaccaccttgccacaactcgcccacgccgggatctctccacctttccccgcaccaccgttctcaccacccacgtcgacccgcccgtcttgattcccgatcacgtgcggggcgttctggcccggtgacgagtcgggatatcgatgatcgtgtttgagggggttgtaggcatcgtctgtagaatgttccgagtccgggtcgacagccgaattcgattccgagtcgagataggattgaggtacgcaatggaccagacgacgattaccgtacgggtgacagtaaggtcgatgtagctgtgtcgtgataccggatgatcagggagatgagaatcaaagttgtcctcccccgtaaaagagactggaggtcgagcaccgactgacctcgtccacggggcacggctcgcactccccaaaaggccgacagacgagatcccccgtcgtcgcgtgggattcgtaccgatgtttagagccgttcaaagggttggtagatgatgatcctgatgcatctgaaggttctgcactggtcaaaccggggaagaaagatagggagagggaggtcaatgtgatcaggctgtcggtggcacagagtcgtgtgcgatcgataaatcagtcgatgttcagtcccaagctgatactcgtgagagtagtctgactcacctcgaaagcctgatcagtagcattgccgagactttgcgtccgccacggcagtagccagtgggtggtgagcgaggttgcgatggtcacggatcggtgttggcttgtgacgcccagcacgttacatgatccacgatcacccatgtagagaggggattgaacgtcgtcgatatcgatgtcgacgtgataacgcataaaactgatcatgccagccagggtggttcagcgcgtgatgtcacgtgacgttggtagattttatgcgttttcatctgatcatcccccgccttccctgcctggcccgctggttctgacacgtaaccctggccagcctctcccgctctcatcatcatcaagatgggacaccacattgacaatcacactccaaattcccattcattcgtaaacgaccagatacattctctctgacttcaaagtgacacgaacgcagagagagacagagaaagacagaaatcccgtcgtcaacctcactgccaacgaggagatacggacgatattcgagatcgaacaggagcacagtgtcataccgcgctcgagctacgaggacgagtacctacctccctcttccacgactcggcgacctacggcatcaaggcccgatcacatcaaacagacaatccttgacggatccatcacgaccttcaatcgtcgagtaaacccaagtctctccttctcattcgacctttgcgcggttaaagaatgacggtcaagacactcaaccgcacggccacgtttgcatggggcacctcggccgactcgctccccctgatcgcgacggggacggtctcgggagcgctcgacgagacgtttagcaatgtcggtcagctcgaaatctggcagcccgagttcttcactgcgggtgccgggcggtcggatacggatgaagggttgttcttgggcggagagggtcaaccgggacctagggggagtatcagtaccaatgccaggtcagtcttgtcatcgtcatcatcgccatcgtcgtgtgcgcgactctgactgataccgacaataaccccccgactcccccctcacaggttcaaccgactcgcttggtcgaacccttcctcgaaacacgccagggggctcctcgcttccggtatggagaccggtgaggtttcagtctgggacgccaacaagatcctggatggagccgagtgagtcgacgggcaatttcctactctgacacccggagcgcgagccgtattgttgatcctgacgacgattgcaacctgggggaacggacagcgcttccgaggcattagtcttcaagaacgaggtccacacgggacccgtcagaggtttggatttcaaccctaaacaacaaaacttgttggccagcggtgcagtcaacgccgaggtgagtcgacgaccccggtgatggtctcttggtaatgacctttactgacaaacgcccaccgtcgacccgtctccccaacggttacagctccaagtgttcgatctgaccaacccggacaagacgcattcgaccggtcccaagtcttcgaaattggacgagatcaccagcgtacaatggaacccctctgtcgcgcacatcctcgccgcctcgtcctcctcgggttacacgtccgtctgggatctcaggcaaaagagggaagtcttgagcttggcctacggaggtggagcggccacggggatgcagggcgcagggaggaacatgggcgggttcgggaacatgcaagtgggcaacaagcgggggatgagctcggtggtctggcacccgaacaatgtgagtctcgatgataggcggcaaagtcgacgatccagagacggtgattgatagacttctgacttggatcgaccagcccacacgattgatcacggcctcggaagacgacacgtcgcctatcgtcatggtgtgggatctgcgaaactcgctcgcacccgaaaaggcaagttccaagcgtgacgtcgccacccccgtatcggattggcgtgctgatccgtgcttttcgactcacgtcgccagatcttgagcggacacgacaagggaatcttgtccctctcttggtgcgcacaggatagcgacctactcttgtcctgtggaaaggacaaccggaccatctgttggaacccccaatcctgcgagattgtcggcgaattgcccagcagcgacaactggtctttccagacggcttggtgtccccgaaacccggatctcatcgccacggcttcgttcgacggcaaaatcgggatccactcgttgcaaaacacgcacgaggccaacgatgccggtcgtcaggctaccaagaccaccgtctcgaacccggatgatattttcggcggtcaacccggcgaagagagttcgagcgcgaccgtactctcgctcaaacaacctcccaagtggctgagaccccccgtcagcgtatcgtttgggtttggcggtcagctagcctcggtcaacggtggcgtcgtctcgctccagtcggtcgtcaccgagcaagacgtcattgaacgtgccaagatgctcgccgatgcgatcgggtcccagggagagctcggttcgttctgcgaggaaatggccaggaaggagggtggagacgcatccgccgtggccggttggaaggcgctcaagagcttgttcacgaccaactcgagggacgagctggtcaccctgcttgggttttccaagggagaaatcgcgcatcaagtcagcgaggccatcaaaaagtttaaactcaccatcaagtcggacggcgaggatgaaaatggttcgcagactcccaaggagggtgccgtgacgtttgccgaaccaggtgacatggacgagacggccggcggagcttccacgcccaaggccgagtcggacgccgatggcaagggaatctcgactccttccgaagtcagcgcgacgaccgacgccacgaaaaagaccgaggcagagaccgagatgaccgagcatagcttgtttgacgatgataacaggatcggaacgcctcaaatcgatgccggcgctggagccaactttttcagctcgatcggacagatgaggagcgcactgcccgatcacatgcaggtgcctcaccaggcctacgccaaggactcttcggtcgccgcgacgattggatccagagcttcttccgtcgcttccgagacgatgaagtcgaacacgttcaagatctatcctaccaacgaatccgaagtcgatcgattgatcacccgggcgctggtcgtaggggatttcgaatccgccgtcaccctctgcctctcggtagatcgattcgccgacgcactcgtgctcgctgtccgaggtagcccggaactcttggccaagacccagcaggcttactttgagaaacgcaccatggcgcttccttaccttcgattgttccagtcgatcgtctcggaggatctgtccgacgtcgttcagaacgccgacctgaccgagtggcaggaggtctttgtcgtgctgtgcacgtttgcccgagcagacgagttcaacggcttgacggaacagctcggtcagcgtatcgaattccagtcccgcatggtcagcggatacaatgatcaggccaactcagacagggccaaggagcttcgaaagaacgcgttgctctgctacctcgccgccggacgattggaaaaagccgtcaacatttgggtcgaggagatgagggaggacgaagacgctgctgtcggtggggcctctactgccactaccaaggcttctcgatacactgcgcatgctcaggctttgcagacgtttatggaaaaggtcgccgtcttccgaagcgcgaccagctatgtcgacagggatctcgctcagcccactcaggccgtctcggctgccgaaagtggtgcgaggacgtattcactcgccgcactgtacgacaggtactatgaatacgccgacctcttggccacccaggggcagacccagctcgctgtcaagtatgtacagcagacgcctgctggttacaagggcagcaagggagaggaggctggacctgcgagtgttcgagcgcgatacatgctcggagctggcgtcggcgagcaaaaggtcgctcaagcgtctacctcagcattcgttcccactcaggcgcaaaaacctcaggcacctgcttatgccatctcgcagccgtttgcaccggtgccagaggtgcaacaacaaccgctctcggcggcgcccaccgcctacagcccatacgttcccgcccagcccaaccaaccagctcaaaatggcccatcgacgtcgacgaacccctatgcgccccacaatccttatggtacatcaaactctgcctatggccctggtccatccacctataccccggctaccaataactacggcccatacggcggacagcaagctcgtgcgcccgctgcagctgtcggacctcctccgatggctcgacccaagcagagcgactccccgggaccaattcctgccgcccagcgaagggatattcccggatggaatgatgcaccttctatggaacccaagcgaacaggaagtgctcctggcaagcctcagccgatcatgtcgcctttccctgaaggtcaagctccaatggcgccggcacagtcacctatgggttaccagcaacctcaaggccagcaacctggtcagttcgcgccacccccttcaagggggccgggagctaccatccctcctccccctcgcggcgcgcaaccccctcgccccgcatctgcgcaacctcctcccgcagcgaaccaagtgcaatactcgcagaacaagccgatgagcccacccatgcgagctggtccaccgccaggcgctatcgctggaccgcctccggcacgggccatgtctccgttggttccgcctcagcatagggtcatgtcaccgcccgcgcctcagcaacaacagtacatgcaaccccccgcaactcaacctcagacgtctacccctggcccataccaagccccacctggtgcgcgagcagggccacctcctcctggacgtgccccatctcagattggtaatgcgtctgtctctcgcccggcttcagctgcgcctcccgcaaaggcagctcctaaataccgtaagtcaggtcccgcttcccgtcgtatgacaggaagttgaaattgcatcctgcgcacagccacgggagatcgctcgcatatccctgcagggtcgcaaaacgtgttccacgccttttccgacgagttgagccggctgacacagatcgtgcccgtgagtgtggcttgttccgcgcatagagctgctgctcacatgaagtccacttgcaatcagcctcaacaacgaaagctcgtggacgatactcagcgtaggctgaacgtactctttgacgaattgaactgcgagactgtgccagaacccgttgtcgcccagctgaatgaaatggtcaagggtgagtcgggcatcaagcgataccctttggtaatgcttggactgatcgcgctacgccctgtgcttagccattgcggctcgggacgcacaggcggctcttgccatgcatgtagacatggtaagcggtttgctcttccggatgattctgtcaggtcgaacgcttaatcggatcgtcttctcacacagttgacgcgtggaccaaaatcagagggaatgaccgtttggatggtgaggagatgtttcacctgaaatttctcaaggtcggaactaatatctgctttcgtattcgcagatcggtgtcaagcagcttatccgactgggactatgatgacgtgcattccataatgtatcattttctgattcgatatatgatatgacgttcgggagagttattacaacctggattctcgttcgttacctaattaatgcggcaagccgattttcgacatctgctggggacgacttggaatctgtcgtaatggaacggcggaagtgatcgatcagcgaatgtcattgtctcgctgacgagcactgaaacacccacacttgtcgccgtgctttggatgtttggccatgtagttttggaaggcgggcacgaccaaattccgaacgtcggcgtgcagtcgttcgcgaaggttagggtcttgccgggataatgtgtgctgcctcgagaggatttcaagctcgtcgagcctattgaaaaagttggacaagctgtccttgaccgcttgcttgtcacctccgacaccgacaacacccccaaacctcccagtcgaagtaggctctgtgagcaagccgaccaattcccgccatgtatcgagatatctcgccttggcgtcccgatacgccgagttgagaatatcttcggccgtcgatcccataatatcattggcggccgactgatttgacaggatcagattgttacgcatgtaactcagattattgaggacatagatcgaagataccggtttgcgcatcgagcgagagcgactgtcgagcgaagagacgagagctgacaagaggtccgcgataaagtgttggaggatgccatcttcggctcctgaccgaggtggctgatttgtctgtgcgcccatcaaccagttgcgatcgcctagcgaagtgagtagctccgagacagtggcttcgtacgccgagaggttttccaaataggtgacggtctgcaacggcgattacggtcatggtcgatcaaccagctcgacccggcatgtgaattcgtgctcacggtataggtgatatccgcgatcgatgaggtgctcatatccctgggcccggtcgccattggagctctgacatcgaccagtatctcggggaaactcctcagacaagcccctcgtagtgcaccacttgcttctgcgacgatcctctccatttcttgatcgtccagcattcgcttgatcgatccctcccaacggccttgaataccattgagcgtccggtagagttcgagagcatagaacgtattcgcattgagagaccgtttgatgatgttggtctggttgacgagcagatcgttgagcgtcttgatgggcgctttgaagatggacatcaaggcggaggtactggaaggagggaagagatgatccaacaagtcgtattcggtctttcagagatggatcggaaaaacgggaatgagcgagaatggcctgcctttcaatacgtgatcggaaactcacctgcatcatgatggtcaagcactcggaaactctggcgataatgcgacacttttccttacggccctcttcctctcgacctggagacattggaccttccgccaggtgatcgaattctcgaacgacggggttgatacatctcgtcacgatatagtctcgccggctaaccagatagccttccttggcggagctcagagctgaatgtgtcgaaggcgaacaagggtgagaggacgatctgggaagggaagagagataggtgtagactcttttgatcaagggcagagtcgggatagcgttcgccggcgccgaaggccctatggtgagcaacaggcgagaccgatcagcacgttcctgcctggagtcacgatgcagagccacgtaccgcttcggatgatgccttctaaatcagggctctgatctgcagcttcccgaagaatcttgagtagcaggctgacgaggttcttcgtggctaggtcgaccaatttgctctaagataaaagcacttcatgagacgtctcatttcaagagggtcaggaatggaatactcacaaagttctggatatgcgcttccgagctccgaaggtcgttcttgctcaacctgtcaatctccttgagtagccggttgacagcgcccgtatattcgtccaattgcgagtacgttggtctgtgggcagtctcagcgtcagcgagtacgggtccaggctcttccttgaggggcggacttgcacttgagagatgatcttttcttcgtgctttccgacggcaaagtcgctcttgatgatctcggtcctcacattctcaccgctcaggatggcgagagcaatgtcgatatctgaatgacgagcgggaccggcattcaattccggtgcataagacccggcgcggcgacagacgcaactcactggaggcttctcgtgtaaggttctggatcccaaagggagcgatcgtcttgtcgagtctcgataaccgtgtatctagctgggatagcaaccctgataatttgggtataagccacggctcctatacatcgctcatccccgacgcagagactgaccggtcatcctgctcgccaactggttcgtctgctggagacgctgttccagcaaagcgagctcggcctcttcctccataatggcaggttgtaccgtctgatctctatcggatgaacactttgttacggccaaagtgggaagcaacaaagagcatgatcatacgacttggaatggatgatgaattgatgatgatcttgctcttgactgctgttggtggtttccggaactttattttcggaagtaaaatcgggaaattcacaatcaaagcgagctaccatagatgttcggggtacaacttgcttgccttgataggttcccatcgagcaaacaactccgaccctaactcgtcctcttgatagaattgcttgatcagagcctactcgtcgatctatacccgacagaacaataattggaggtcttgggaggcagtgtacgcggtcccagagggagaaattcaaagatgttcatcctctctcgaatacaagtgagtcccgtctcaagaatcccaagattcggtccggggaccttactatcgcaatactgaaccgctcgatcgtggtaggactcgatagccgtgcatccaaatgctttcgggttggaaccggagatcgcagtgaaagatgcgatcaacgtcaagtgagaattaatctcgcggccaggtccaggacttcgtcaagggtctttaacgtcccatctcgctcgctttttgggacaggtactcgaatcatctgattcctgggatcggattagcattgtctgcatacgatattctaacttgcactgaggggaacgtgcgctatggtgacggtctgatttggtacaaaagtgagtcgagactgtgcctagtttttggagcacgaactcctgatcagatctgttcttctgtgtagcaatcttccgtgtggtggtatttgccccaactgggggagagatcctcgtcggcaagatcatctcgtcaacagcagaacacatccgaagcgagtcactttcgttcctagcatgacccagaaaccactggctgaccttttacgttgaacacgacctccagtctctatcgaattctttaacgacatttacgtacccaaagatctccttccgcacctttccacttagtacgtgatgcggacgtgcaggcttgaggatcgtcgccgtcagctgttaacgcccgattggtgtatgctcaacttttagcgacccagaaaagaaggcacacttctatcagcctcaggacgatccggaagaagccgaagcggaagacgcagccacaaatccgtttgatcagccagcagaaggcaagtcgagagcgtacgtcagagactgattgacggatggtatgctaacatcgcaatgcgaacgaactcgcctgtctcgctgtagaacggtcatatttcgacacggacgatgtcgtccgttttcgggttggatccctgaaatggcaagaactggaaccagaaccgcccaatgtcaagaaccgccctccccttatagatcccaagaccggtctcaaaatcgaacccacgccagaagagctcgagttgaaaaagatgcagagggaacgggacgccccgttcaagatcatcgtgagtgatcccgtccgaaacgagaggacggagcgcagcgttgatgacgattgtcgcgctatcctgtggcaggccgagatgaatgaccaaggtctcggaccgattagctggtggactccagcagcagaagaagaggaaggtgaaggagccgaggcgcaagacgacgttgacatggaatgaagagcgtcaaatcgatacagggtcattgttgtattcctaggcgaggtcagctgtgcatcataaggataggatgagcgtgaactacaagaatcttataacgaccggctcgaaagtagcaggttttaccaacgattcctgcgacgatttgcggtatcagtcgagtcgcacactgatcctggcgagatggcgtttcagacgtccgaggctaaagtatgccagcaaaagctcatgagaggctatgtccttgccatcactgactgagacagatccggaatagcactccaatatcgacttatgcctctagagcaaaaggaaagacggggtatatgatgatagtattcgagcactacaattgtgcccgtgatgaaaacgcacaatccctgacgctacctcttcctctagcagctagaaagagcatcccgatactcacttggtcctcatgagcctcatcaacttgacgccttctctctcgtaccgttcccgctcgcccggtcggtcgtcatcgacgggcgagctagaaaagtgtttcttgagcatcttgaagaaccgcatgtcggcctgtcgcagtgaaggaggaagaggcggcggatcataagctcgatctcgaggaggattggtattgtgaggacggtgccgctaggcattcaagaaggatcaaaggacccctcaggtcaagccatcgcttacctttctccgctttttccaacagaacaagacctccctctctgcacccacaggacacaacgcgcaaagcgtctcgacgagcaaggggaaagccggttcaaaatagacgcaatctgccgccaggatgatatccggatctgatggcaggtcctcgtttaagtcggttccccagtcaagttcggtgacttgaacgggtgggtctggtgtcgaggggaagttgagaaggacgttctctttcatgagcggtaacagcgggctatcaagcggtataagaggtcgtatcagcgatatatgtaagactctcgtggagaagaaaatcgagacatactcctgatcggtgatccatatccgagcggacggctcgagcagccctactacgagacctacgaggcccgtcccgcttcccaactcgacaatggtcttgccccgaagttttcccggtccatccgcatgccggtacgctagatagttactgagtacctagcgagaatcgagagaaaaacgtcgtcggtatcaacaaacagttcccgatcgtccatcgcggtcacgagtgcaggtcgtttccgaggcttgatagcgtacttctccggcaggccacgcgatcccaccacatcccggtcctgcatctacggcgagcctgacattcttgtttaatccggctactttaagcgtgacctcggtttcgggagcggtcggtggtcggatagggacgatcgattcagagaacgaggtgaggatgtcgaacgaggaggacgaggagttggtcgatagtgccggcgaggccgatcgcgaagtggccattgggctacgaatgcagaggaatgtcgaccgattcgctgcgtcagtgtttagtcctacaagcttgctgatacatctcagagtaatacggctgatatctttactccatcgatatacaacctgaagaacagcaaaggaggaaggggaagttagtcgattgaccaaaggtaaggggagtcggcttcggaatcaaatttctaaagggaaatcgggggaaatcatttgcttccgaacatcgtcacctcctcggaaaggaccgaaactacctcttgacatcgcaacgacaagggtgagtatagacaaaagtgtagtagtcgtgcacaggccacaggtcggtcaagtctcgtcctaatgacaagtatagacctctactcatcatgagttacaacaatgaattcatcttgaggcacctcaccaatgatcctcacgctcccatctcgtccgtagcgtccacctctcaaccaccctacgcacctcggcacaccctgattccccgtggacccaccttggcacacgccttgcctccaacacacgtactcgaggaagaagccgttcgatcgtcatctctcgagctgaccagacaatccctcgaattccagcgtgagagggaattggccgaagcgctggccgaggaggaacgtacggaaaaacgccgcgagctcaaagaatctcaaggcacctggaccaagctgatcgtcggccgtcgaaagggcaaagacaaggaaggaggttccggcgctgaggatggaaagacgaaaccgttcgacaggcctccacaggcgtacgaactatacgcggcgatcgacaagaaggatctcaagtgagctgtcgtggcacggtgttagcgaccgacatgcagctctgggtctcgctgcgaaactgatctatgcgatttttcgctatcccaatagttatatagcccgggtcaggtaagattcggcaattcttgaaccctccatcacctcgatgtaacggacattgcgtctgccagggatcacgccttcccactcttgttacagaagaatgccggagaattccccatcatctacgcctcgcgaatagggcactctcataagggtacgtagaatctcgttccgaaactttatgtagtccgatgacgtctccatctagagctgactctcgaggccatgcacagacatcgtcatcttgctatgtggagcgctttcaaggtgtgtagcttcagggagacggacgatatctctgggctcactgatccggctatcattagatacgtaaatcacctcgatgacgaggactttaataaacgggagaccatctctgttctaagagcattaagggtcaacgtgagttgccgaacagactcactcattgtcgaaacacgctggactctgagctttctataccgatgtcggaccttgcagctcaagatggccatcgataattcactccttccagcgtttgattcatctctcctgtcgtcctatctgcaagtccttattatgtccgaaggggacatttggatccacaaggcagtacacgaagtcgccctctggctgagaacgtgggaagtgcaaccgagcacgaccgcgcagccgatccaggtggaccactcccagccatccgtggatactgagcacacgacgaggaaaagggccttgtccgattcggatgcgccaccgttcaagcaaggccctgtacacaaggctgaatctctcatctcctcgttctgtacgaaagaactcaagaatgtcccgctgagaagtggcaagcagggcggattaggcgtcgacgagtacgtggccaactcgactatggatctcgtcttgatggccggatggacagtactgagcgaaagtataccggggggattggaaagccttccagtgagtctagaggaattgggagcgtcccgatcggctgtgccctaataccgggatattcatcgaacacgcaagacctatacgttcgcccgtgatctccgaacctatacgatctttaccgagcggatggaccagcaccgagtagccatacagccccgcctgcaagcgaacaagcggttaaaaagacaggtcgaactgcttctcgaggtctgtagtgatacgcgcatcggaatcaagggcagggtcgagattctcaaggaacgcctggatggtagatgatcgtgcgatacagtctggcccaatttctttcatggtgggacatcactcagtagtacatgctatcaagccgtgtgatagcgctgtaatacccataaacctaaatgatataaccctttctcttcacggtcctattcgatctggactatacatgacgttctcattcttcgttttcattccctgcctcaagccagagggctggcttgcaaagcagcattcgcagcgttgaccgcggcagcagcactggacccgccgaccgactcggccaatgtagtggatccgaggaggctctgagagatctccttccgagaacaacccgacgggttgatagtcccatcaaacctgcctttgagccattcgaggacggcggggaagtgcaggatctccatggcaaagtgattggtcgtggaagcgatgtcggtgacgaactctacagtcgcgccgtccccacaccaggaatcgaccatgcccgggacgtccgcatagggcacgacatcatcattagcagcgtggtatacgtagactggtacccgaggagtcgagggagccgccatggtctgctggtcaaggatggactgcgatacaagggtaggataagctcgcagctcaggttcgagatgcagctgtttcgcatggccttactttgatgatagagtcttcaagtgcagcctgaccgatggtcacatacgtctccaggacctcttgattggcgtaagcgaggatgttgtcggtagcacatcgtgttcggactttaacaagttcttcccgtccctgaacggtcaggagttcctggattctgctttcaaatgcagggtacgctgaacccattcctgcgagtgcgccgaacgccactgagatgaggaaaagattcaacggctcagctgtgtagcgatttggggcgtcgtgcaataacactcacgtccagccaaggcagttccgtcctagatgggttgcagcatcagtcagtacgacgaaagagatcgaacgaggacgtacatccagaaacttacgatgaaacgagcggttcctgggaggaaagcaggagtgcctccctgtgccactccaatcatgttcaactctggagcgtacgaaggctgtagagcaccagctgcagcgacatcgacgacagacagccttgagccttcagcgagactttcaagattatacaccctaactcactccatccagccgcagcggctcctccggagtaaccctgatttcgttcgaatggatagagcatcagcctcggcggatgcgtgcaaggcgaaattttgggcgactgacccaaactgcgatcttgggcttgttcaggttcaatttggcatacttgagagtcgctcggattccatctaggaccgcccgtccctcgagttgaccggcaataaaggccgagtcggggccctgataatcgggcacagttaccgtccagccttgggcaagagcggcttgcacgagaaagttttcgaccgtggtgatcaagttggttggggcggcggcaaattgaactaggaaagaaaaacgggcatgaatcagattgcctccaatcgcccaatcgataagatctggactcacgattgtacgacggtgcacattttcgagcattcgagtcctcggcgaacgtataggcaagcagtctatctgtcttggcacccgcaggcctgaggatagtgactaccgtactaagaggttcgcctccaggaccggcggtacgatataaaagctgggtaccgtcgattgctacgttgggaatgatagaagccgtcgccgagatgaccgaacgggtcttcaggatggatccgaccggttgagattcccaccccgcaggggggttatagaacgagtccaaggacggaggtagggctctatctacgagcggtgcggcggtgacaacgcataaaaatgatgaaaggaggacgaagagcttcatgactggtagtttccgacgatggtcaacccgcgagttagttgtaaacttgacttgcgagatatcagaagctcgagcacatacaccatagtgatacgtcgtactctatatacgccacgctgacccgaatccttaatcggcaattatcgacgatttctttaccggtctctcttggctcaacgtccctcaagcctttgtttttcgaggcgggattggaaggcaaatggcatataccatatgccatgtcggtagcaatggcttcggatcaggtgacgcgcacacatacgagcgcaacggcagctctgaaacgcatacgagtgctctctggtaccgactcgtcgacagagccacgagtcgtaacgacctttactcggaccgctgccgagcaaccttgccccgccggggagccacggaataggcgatgtagattggcgctacaaatcgttaagggtagactacgagtcatttagggtcaacttagcgcaagagttgaacggcagcagagtcggcgggctcagatttcgagcgaggtaattcggcgcgagcgatatcaagaatgatatcgccttctaccgccaaatcatgaccttctacggtcccgcatcttgaacggtcatcaaggaggcttcttgtgactagtttgtcaggctggtaatgccctggccctggtagaatagcatttgagggtgcatcgcacccgcatcgcatccgcctgacgcgacccgaacactaccaacgaaacgactacgaatgagtggaacggaacgctaaacagatcgaatcgtccaagctttgaaaatgtctacagatacactccagaaggaccagacttttgtcacgaagatcataagataagtgagtgtatgcataggtagcgtgcatgaactgcgtggaagtctttttcaagtcgtatcgcaacatggctcgctctctttgtcacgcgagttacgaactacgcgtcgccaaccaccaagtcacctcgatccagaactatgcgagcaaagtcaagcatcttctcagatacctgctataccaagagtttccgaatgagttgtagcaaatttagttgatacaacaccgagtatgcccttcttcgagaccccgtacgtcagcctgacacgggtcgatatcctgtatcgtctgactcaggctcttgtcgtatagctaccctcaactcctcgccgggatctcctcgcctgcttccgatcagccggtctacctggtcttttactcggacccggactcgacgactggaaaactatggtgtcccgactgtagagacgtacaagagcccatcaaagcggccttttccgctgaaggggcacccaaggggatcgtctggtgggtcgggcaaaagctggcatggagggatcccaagaatgaagcgcgaacgaggtggaacgtacacaacgtaccgaccgtcctcaagttggtggaagtgagtacaggctccctagcccaggtcttcatatctaaacatatgggctgactgaactggcttgttttccacagggaaaggaagtcgggcgtctgactgaaggcgagattctggagaagggtcgactcgctcaactgctcgcggcatgagccgttgcttcgcggctttggaccagaacctagtcctgttaatatcgtcattgtcataccttgtgtttgaggcaggcacccgagaggcattagcgagtcttctcgtgtcgtgtgcgaaatcgtctgactggttgctacttgatgtccacgtcatttcttgtcgagcgttggatgtgaaggtcatcctttcggaaaactttgtttgttgagccaaagcggctgccctccaggccgtagcgagggctgtgtgagtttactcccgtgactctcgcgggaaccgagccaacgtcgtccgttcccgtcgtctgcctccgtgatgtcgctcgcccttcgtgcgactcggtggagcagagacttttgagaccgagaccgcctttccggccgagaccacgaggtggagtttgtttgagagaccgaactcgacaatgcgatcgaagccacttgccggtcgcccggtcagccaagagccaaggctgtcgcgcgatgattcccgagttccgcgatcggctcaaagtcgtcacacctgtccggcaattaacttggtgatcgggtaggtcggctctttccttcttgttctttcttttcttttgtttttttgcttccctcgagtcagctttggccgtttgcagcagagtgtgattgagcacggcaacgcgcaaaagccgctagaaccagggcaaagggcaggagcggtgaacgttccgcaaacgacccacggaccaccaggcagaatgggcagccatttgggcagctagaagtttcccaccggaacatctcgattgaaacgtaggcctactcccatgcgccgctctcacacgctcgatatctcgcgcccacccagctcgctccggttgcttccaaaagtcggggggggatgtcatcagcggcggctactacactggaagtcgccaggaagggggaggtaattgtctattgtgacgatcggcttttcactatagcacccttgttgatccaccaagacgggtgcaagatacacacgaataataataaagacgagccagataggcgagagctgcgagcgatcacgacgcatgccgtctcgggtgcaaggtcagaaccgacgacccagaaaaccatccgaaccgttcgtccgccatcgaggatgactcctgaaagagaccgatgccgatcgggatctaccacgacgacgatagcaattgatgtaacgtgatgcggagttcacggagaggcgtggtctgaggcatcaatccttcccgagagagcccatcatcgtgaatccgccgcccatccgcccttctcgaatctactcccttttctctgttccatcttgggaattcaggagataccccggatcaatccatattcaataaagatccctcagagcgagcgccgtttgtccccttgccctttgcttttcctcttggacgctcgactccacattatcattaccatttagcatataaacctcttggcctctcggagagatcaagccggttcccatcgattacacaaatagagcttgtcaagtaaattacctccgtcttcgagtacacgcaacaacttctgatataagagggccacgacagcgctattcgctcgatactctcgaccgtcgccctcaaagactcgtcaattggacagtgcgatcatgacgaccacgcctgtgggctgcccttacattcgcgacgtcctctcttcgatggacgtcctcgctctttccacaccttccgtcgaaggaaccatcacccgtggcatgccacacccgcggcgaggactcgacgtcgagccctctgcagcaggtccttctcgacctcgaccatcgcaagacatcagaaagcgaagagctcgtgcgatgaccactttggataggactaggccgaaaaagaagaggaggacgtgtgatgctgaccatcaccagacccatcaatcatcacatcagcatcagcatcagcatcagcatcatcgcccttccactgtacctaggcgcggcacaggtccggccgaatccgtcgcccgagctacgcgcgacattcaccggacgcaactggacagggcggcggatcaggagaacaacgatgatggtgatgagatggatgaaggtgtctctcacggggaccggtcggatgacgaacaatacaaggagggcgaagatcagtatcgttgtgatgagaggatacagtgccgagtcactcgccctcaggatgacacctccgagctctccacgacggatcggtttaggaggagagactggcagtcccccatctggagaagacgagcggcttcggcaggcaggtcactgactggctggccacgatgctcaagtgtatcgtggcgtcgacctgcggtcacgcattctcagggtgagtttgcaagacgagtctgaacgaccgaacgagatgctaatggcttgtttttgattcaagatctccaagccgcgcctgtggatatcatcccgcccgtggtgactctgcaccttggtttctctcagaccgacggattgaccgacgttccagccgcattctacgtaagcggcacagtcttggccatggcgacgtttcgctaacgataccgtttcataaccaggccggaaccggaatccccaccctcctgcgattggtcatcgatcgcaattcgaccatcgctcacgaactgcgacctcaactgcacatgacccttacagggactttgcgacttgcccgtggcgagaggcagatcatacaggtttccgtctccctggccgacggtctcgccatttggtcgcgcgacgccatcaccgcgcatcgagtgtgcccctttcgatcgatgcctggtcaactggatcctgagcgagggcttccgggcgggcgttacaaccttccattaacggtgcaggtgcctgataccaggcttccgccgtctttcgaagcgccggacggccggttcgctattagctatcgtctcacggcgacactctcgattgacaatcccaagaagcgtgaagagcgaatggtactcggcatggccaatgctccattcaccttgctcccgacaactctccccgatcagccgttgacgctccagcgagtgtcaagtttgacgtggcatcgctgcggactgcaatggaacggggagacgctcactgattgcgtagatgtacgggaaaaatgggcgttcgagcctaccctgtaagtccagcgaagcgtcctagtcatgacggtcgattcttacctgagacctcatcccgacagaccctgcacgacgttttcaccgacccaggtcgttcctgtcgatctcttgctcacacccatccgggtcgagtcggccaaagcgagaatgttcatcaggatagggatcaaacggtgccagcatgtcaccgacacggatccgagtgacctttcctcgcccatcaatgaactccaagagtcgatcgtcagtgcccgtatcggtgtcttcgagatctctgggcaagagcctaccaggatctcgggaacgtgcttgcccctagccgccgatgggatctggccctacggctactcggcatactcgggcgaagtctcccagccaggacccctacgatcggtcacggctggcaatcaattttacgcgtttgtccagattggacgcctccccgacagcggacccctggcggactcgttgcccatcgacctacccctcaacacgcttctgcctctggatgcagcgcggtaccgagacttgaaccgtcacgctacgcagctatcgcactgcaccttgcccatcaccatcgggagtgtctctgagcctcaaggcgcgatgcactttttcccctggtcagatctgagcttgagccacggtccaaggcttatcgaaggaggatcattttcgtccgagaacggatggctcgttccgccccctccttatatcgcacaagcggacccagatgcccaacctgaccgacttgtcattacgaccttgcccggcacgattgagcagaactcgaagtgcgacacggccgaagagctggatcaagatcacgtctaagcatatattaccgatccctacgaagatacgaaaacgcaccatgtgcgggatgaacatattttccttgcacgtgaatacgagaatgtaatatatcatacccagcataggtcttcgtcccctgcatatgcacaataatacatcatgccgtgtcctgatgagctgatgctgctgtccaaccaagcgtgagctaggtggcgtgggtgagcctttaggcaacgtaagcgaatctgcttccgatcggaagttgtcaaaaccaagagcctcaagacgacgagaattctttcgatcatttcgtttgaacaggcttcgaaatgggacttgcctcttgactacctggcagcagtgtttaagccccgttactttgcacatacctagggacggctcacgtcggatagcatcgctcgatccatccgcagttccactcgggccggcgtcatagcgaaagcgccaccccaagatggacgatgatatgttcagcatgctgaacaagaccaaaaaggtcaagaaatcgagcaatgtcgcttcccagtcagctagctcgaccaaggctgccggcaagcgacgaaccagatcggcttcctcggaatccgccagtgatgccaatcctgccgaggacggcccttccgaacggaaaaaggtcaagaccgacacttctgctgctactgaagatcctatggaagctttggagagcaatgcaggagttgaggtcggggacgagaatacggacgacatcgagcggggtgatcggactgatgcgggggatgttacggtagacatcgaactctcttcagagtccagcaagccgatgcccgttgtgaccgatgactttgagcaagaggcagagagagaggtcgccgcgacgagcgggtttgctaaggtggaagaaggcgagaaaatgaggcttgtccaccaagtcagacatcaggtgagctatctcacatgtcgaagtctctgatacgagaaggatgtttgaccctgatcacacggtatcaggtcgctttgccccctgactacccctacgttcccatttcgacacacgtcccgaaagacccaccagctcgaacctacaaattcactttggacccattccagcgtgtcgctgtcaactcgatcgaaagaaacgagagcgtcctggtatcggcacacaccagtgctggaaaaaccgttgtcgccgagtatgctatcgccacctgtttgaacgagaagaagcgagtcgtgtatactagtcctattaaagttcgtcggctggtcccaagcctgtggacgatgtttgcaattcggactgacaacgatcacgcaatcaggcgctctccaatcagaaataccgagagttgcaagcagagtttggagatgtcgggttgatgactggagatgtgacaatcaatccttcggcttcgtgtctcgtcatgacgacagaggtgagactctggaccgcggctaccatagcgacatccactgatgaatctctaccaatagattttgcgatccatgctgtacagaggttcggaggtcatgcgggaagtcgcatgggtcgtctttgacgaaatccactatatgcgcgacaagggcaagtcacggagcgattgcacagcctgtccgagtcgcaagtattgattgcggttacctacgcagatcgtggagtggtgtgggaagagacgattatcctattgccccattcagtccgctacgttttcctctccgctactatccccaacagtatgcaattcgcagagtggatcgcaaaactccacaaccaaccttgccacgtcgtctataccgactttcgcccgaccccgctccagcattacatgttcccggagggtggagatggaatgtacctcgttgtcgacgaaaagagcacgttcagagaggacaatttccaaaaggccatggggtcgcttgctgctcgaagtggagaggatcccgcgaacccgagcggaggcaagggaaggcaaggaaagacaaggaagggaaagcctcaaggtcagctctcgttcttttgtactttcgtttatcatactgatctgacccttccattacaggcgaggcttccgatatctacaagctggtcaagatgatcatgctgaagaacctcaaccctgtcattgtctttgccttttccaagcgagagtgcgaatccttggcgatgcagatgtccaagattaacatgaacaaggaggaagaatcgctgtctgtagaaaacatcttcaacaatgcgctcggtggactgaacgacgaggacaagcagttgcctcagatcggtcacattcttcccctcctgcgacgaggtatcggtgtccatcacggaggtcttttgcccttactcaaagaggttatcgagatcctgttccaagagggtctcatcaaggtcctcttcgctaccgagaccttctcgatcggattgaacatgccggccaagacagtcgtcttcacatcggtgcaaaagtttgatggcaaggagtttaggcatctttctggaggagtacgttgtttctgggtgtgtatctcaagtatcgaggagctaatgctcggtaaaatcataggaatatatccagatgtcgggacgagcaggacgtcgtgggttggatgctcgaggaatcgtcattatgatgtgcgagcagaaactggagccagaggcggctaagggcatggtcaagggacaagcagatcgactggactcggcattccatctgggttacaatatgattctgaacctgatgcgagtggaaggcgtaagcccggaatacatgctggagagatgcttctatcaattccagaataccgcaaatatcccggtactcgaagacggtaagtcttagcttatcgagcacgcccagatatcttcaactgatatctaatttttttcccgaccagagctccgcgatttgcagaaaaaggaaaaggcattcaaaatcgacaggcgcgaggaaatcgaggaatatcacgagatcagagacacattgaacaagcaacgaggcgatttccaagccgtaatcaccgagccaagttacgcattgccattcctgcagagcggtcgggtggtccgcgtgattgatgggaagcgtgacttcagctggggtatcgtcctgcaatccgagcgccgtcactggcctatggttcgaggtgcacccagtaaaccggcagacgtcaaagcgtccgatgagcacatcgtctttgtgctgctcaactgtgcaacaaatgctcgagtcgactcccgtgacaagtccgggggtgccatccagaccatccaacctgccggagacggacctggcgagcctgtcatcgtgcctgtcttgttgagctgtatcgagagcttttcggtcattcgaacgcatatcggccgggaccttcgatcgctgcaagccagacaagaagcttacgcccgcatcaagatgctcctctctcagaggaacggcaaagtgccggttctcgatccggtcgctaacatgggcatcaaggacgagggtttcaagaagctggtgaaggtgagttttgcccgaagtgagcgagcattttgacgtcgtggctaatgaccgctcgagatgtccacagcgaattggcagttacgaacaaaagttgcaagctctcgacattgcgaaatcgcctgatcttgagcgcctttacaatgaatattcggactatgtcgatctcaagaacaccatccgagccgtgaagaggaagatcacacaggtgcaaaacgtactgcagctagaggaattgaagaacaggcagcgagttttgcgtcgactgggcttcacgtcggccgacgatgttcttagcgaaaaggcccgggtggcctgtgagatcagcactggagacgaactcctcctcaccgaaatgatctttagcggagccttcaatgagttgacacctgctcaatgcgcggccgtcttggtctgcttcgtgtttgacgagaaagtgcgtcaaatccagtgtcctattacctcgtttgcaagcggtggctgatagcgtccacattcacatcgcagagcgagaccaagcccaaacttccgaacgaagtgcaggcggcgttcaggacgcttcgagaacaggccaagaccattgctcagatctcggtcgaatcgaggttgcccatcgtgcccgacgaatacgtcaactcgttcaagccggaattgagcgaggcagtgttcaagtggtgcaacggtgctagctttgcagaactgtgcaagatgtgcgatgtctttgaaggttcgtccccattgcgcctgtcatcaacatcatctcggaatgcaaatgctcattcgtctcaccgcaggatccctcatccgatgtttccgccgattgggagaattgctgcgtcagatggccgcggcggcacgagtgatcggaaacgacagtctggaaaagacgtttgaagagtccctcaagatgcttgaaaggacgaacagcatcatcttttcaccttcgttgtatctctaggttgaccaactttatggcaacccgatcgatcgtgcagaatacgtttcataacagcaaatcaaatatagggtcattacggctgtttactcgagcttgcccttgatctcctcaaaggtcttcttgatgtcgtccattcccagctacaaatatggtgatcaggaacgcccatcctgaacgatgtcgccgggatgatacgagactcactccctgtccgggccaagtgatacccagacccgccgagtcgttctgcgcaggcttgggaatgacgtgaaagtgaacgtgatcgacttcttggtgtgcccatcgaccgttgttttgcaacaagttgtagtgctcggctccctagaaaggaaatgtaagagagatcgtcagtgccgaccgctcgttctcgatcggtcaccgcctggatgtaggggggtggggcagcttacggtcgctttggcaagacgtttggcaaagggcaagatatccttcatatcctcgtcgggaagttcggtgatggtacggcaatgatctgtagggtgaacgatccatgattcagacgtactgcaacgtacgtgacaattactgaagtattacgggcttacatttagggatgacgaggcagtctacgcaggagcaaccggggaacaagtggatgagtcgagctggacgactcgtgtcatgtgaaaagattcagactcacggcccttggcgataggcccaacgtccatgaaagccagagccgtctcggattccaacagtttgaagctggaggagcggaaagaggaagaagggtcaggctgcgaatgtggcgtctttcaggccagtagtgggtgatggctcaccaagggatgtcgcctgtgatttgaggtttcggaatcgcaaagaggattaacaggcgatcagctttattggagcgaaggccagagtatggcggtggacgtgcccttgatgatcttgcagaagatgcagctgggcgtcgggatcattccgcattagccggatgtccaggttgtagggaacccgaccggctcacctggcaagagaagtcatgtttgaggtatatctgaatatctagcttatttatcgatttggcgtctgtaaaatcggcgtggtcgatgctgtgagcgttgagaataggctcaagtaccaagtagcgatgtagaatccgagtaattagcctctggaccaggttgacccgtctgttcccgctcaaacaacttcgtcatattcgaccccgcacagacgcgttcatgcaagggaaaaggatgatagacacactctactaactatccactcgggattcgatgtattctaccatccgtaaccctattattcttgccataaaatcaacgcagagtaccaggcggtagagtgtatagtttacgggctcacaactcggcacggtctgcgatcgacgacgacgatagccatgtccgacgaagcttcggcagcatcgttgcgaaaatcgggtaggactcggaaacgacccctcgctcccgatgcggcgtatgaacagagtcccacaggacctagcaagagtctcagaatcagctacagtgctactcccatgcccttcagtcctgacaaggctttcggaggagacctaggtcaggccatggctggctcttcagcgggactgcaaaccccgaatggaaacggggtcgaaggcgagaacgacgacgacgaagagccggaggaggaaccggtatgggccgaattcagtgcggattattatcaaggtgagtgtcttcgtcgtgtcgcgagcttgcggagatgacactaaacaagaccgccacggtcaaagtcgtcgagcaattaccactcgaattgcatagaaactttgcattgcttcgtgagctcgatgagcaaacgcagcgtaagttaatacgaggcgacacctgtgataggtgcaagttactgacacaatcatgacctcaggtcaaacctctcagctgctcgaactgattcgacaatacgccaatgcccgactatctgcatcccggaccgacctgggacagcccaccaagccacctcgtaccccaagcaaaagccttcataaagatctcaaccatcctctaccggacttttcgaccttgaaatccatgggagataaccacatggacattgacacgctgggcgacttgcccacaacgccgggaaaagggcaatccgatcgacagttcccgtcaaacggcgataccgctgcgggaccgtccagacacgtcgatgccattcccgaagctcacctggacgttcccctagacggtcaatcgggcgggaatacgctctactcggtcaagttgacatcgaatatgctgccccagattgggcaattggcgagagacgtcttgaggggagcagacgaaaaagttgggattgccaatgggtgccttcattcggcgagtctccccaccaaatgcaagatcatctgattaattggctgactgtcttttcttgaatcgtggtgatcaggtcgatcgacacgtccgaaccattcacacggctttgcagactcaacaagccgccgtgaatctgggtatagaggctggaacgctcccgtcagagatggtcacgggctcgaccggtctaggtgcatccggagctgtacatgcagatacgcaacaggctatgggaatattctctggagctcgcgagaggggcttgaatggaacggcgggggacgggatcgcgattgatgggctcaacgtcggtctagcggatagtcggatgggaccgggaagagcgaaaaaggacgacgcggggcctcacgcgatcgtcgctgggtatatcgcagcccagaactttgatctggcattggatccggacgaaccgaggtactgttactgcgaaaacgtcagtcatggggagatgctcggatgcgaggtgagttgtctcttgatggtagttccatcttgaaatccggtgtgcttaagagtttgtcttggcagaacgatgactgtcctcatggaggatggttccacttgacatgtcttgggctcacaacggcgcccaaaaacctatggtggtgcgacagttgtaaacctgcgggagacaaagcaggaactttcaagtcgaaaaagccgaagaacaagaagaagagcaggagatgagcaggagatgagcagcagagaatggaatacgaggatgagcagtaaggactctttatgctcacgacaagatcgcacgacatcctcagtccgttacgcaatattggtgtattacaatatatggcggcctcacatgatccgcagtttacgataccctgactatctttctggccgcaacaaagtcgccttcgctaccggccaagacgtaataacacgaagaaggtcatccgagcagcacggtcgcgatcgatacagcactagccaagagaagaccgttggacggcgcgtaagcaatagctgtgttgttcttatcgccacccccgcctccgcttccgtgtccaccaccacctccccgacctcctttgtcgacaacagtcgcatcgcccatagaagttacgttactactgactcgacctccacccatgccttgcgcattttgagcagcttcacgggcttctctgatcctgtcgaccggtggagggttattgtcgggcccggtcaattgatagaccttgatcgagttgatcaaaaaaatcgtattcttgagattggcctgaagaatgaacgacaggacctcagcgattcgagatcgatgatggtgggagaaatgtgaggctctctgactgggtttgcaacttgctcggcgcaggtgccaggacagtgactcgtctctacgaacaggcctctcgatgtcagattcctctacttggagtggattatcggtgccttaccgctataagtacccccagcccagtcgcctgctcaccgatatcatgtcggtcagatgctgctctcctaccgaaacataaacatctcgcttaccgcaaaggttcacggtcaacaccaattgattattcttgaagtacttgctcacatcgcatgttgacgagtcgaacgctgcgctaggtagtcccctacatgtgacaaagtcgatcagtagtagatctcgggaactagagctttgaggacttgccaggttccgggagcaggcgcatttgtcgaaatactgagaaatcgaaaatcctttaatatacttaatgccagccttcttcagtctcactgactcatgaggaatgtttttcctgtcaaactcccctatagcgcactcgccagcaatcggtttgatgtgtgtttggtctgcatgacggaagacgaaaacgcttacacattcggattcctttgccgtcccacaccatcgcgaatacgccgccaccgttcgaattgaacggttcaccgtatgtcaagttggagggagaaagaattccgcaccctgtcttgcctttatgcgaattatcagcatcatctaggatttcctttaaggtccatttttgagggactcaatcgtaccgtttgtcgaatcgcaatccacattctggggcaacgagatcgtatgaccgggatcagcatcccgttttcgaccttgagttccacttccgcgccgggacaagttcaccccggtcgtcccaccgtacatcccaggagcagcattagtcacgcacccaggcgtcgagtggctaccagaagggttgggtatcagctaggttctcttcgtctcgtttaagatggtcgcgaacatagtagcctggctggagacgcgatcgatgtgttcgaatacgggtcagtgtcgagctcaagcggtaagacgaaacgatctctcacttgtgaactcggtcctgcacaccctccttttttcgtacacgatgccgcttcagcatcggatctcaaaattcgattcgacgaatggtgaaacacgcacgacgatatcgatctctcccaaggtgggccaagttgccccatatcctaacgtccagactacgtggacatggtcaagttgagtattatgacgtcggtttagtacccgaagacttacaagatggccagattccacaactgcacagatgggatgacacccggtagtcaacgattggatcctgatttttcgaccagcccgtgcgagactgacccccacggcatcaaggcaaagtcggcgatgaacaatccaccattgaatatggcctctgaatgtagcctgatcgagttcctcaagtcgcccgcatggagcgttgtccaaccgtccgcctggcaaatcagagcaggtcttcgataatcattcattcagccaacaagtcgtgctggcactcacctgaatcccgggtgttccatcctgagtccaaaaggcgagtcctttctcgaatgcagtgtccctatcgacgtacttgaccagtccgttggaaggatcaggttccgtaaagaaactccaactgccacacgatagtcgggagagatcagagcgaggtttctggatagtctggtgcagggtatcgacccttactcgtcaaagaaggtcgtccccgagtattccacttgtggtttccacaaactctgggccgatactgggatgtaccagagttgggagaagcatattaaccctagcagggctctctcatatttgatcattctagcgtagcttgatgggaaatggtcgcagaggaaaacacgttccaattacttgtactttcctttcgggagtgggctgggatgttggtagtgcttcgaagagttagttatatgtgtatgagtgacgtggagaaaaccaaatcggccgaaagaatttgcgatgaagactgtgcgacgcggttgcagatcttgtcaaccagcagctagcaacttgtccacgaccctgtgcccagattcgtttttgttttgtttgtttgttctcacttttcttcttctagcagctccccatcaacgtcctttgatcaacttctttcccttggcccccttcctttgacttgattgtttcgatttgatcgcgtgatgcaatcgatcagacgagcacacgtgacgcccgaatttgggtcgccaagtgaaacacgaaatcgggttgaattccttcgttcgaatgcgggaacaggcgacaatcgtcagcccatctcagccacagccgagttgaaatcctcaaattttgaactttgtagacatcctggctctgcgccgcccagtttatgtcgagagctagagcgtaaatcaggcaggaggacagagacagtgagcgtcgccggactcgcgtcgctcgtggtctcgagcggcatggtggtgcactgaagaccatatagaggtactttgctacgacaagagatagacgtgaacctctagcagcgttgtcacattgttatagggacgggcaagctctgaacgcaagtgcatgtgatgtggaccgtctcccctctgcctgccagcctgcttgccgagatggctgacaatatcacccagatatgcgcaatctcacccttgtttcgtcacgatcgggctcgattgtgtcaacaatctcgcacgcagcaatgtacgacgatgcgaaaatgcagtgaggctgtcgatcgatagtatcgcgggttgtatcacttggtttcaccctgacgatcccctcgcatcttcccacgtcgcgctggggcctatgagcgttccctttcggcgcgcaaatccgaaaaagccggtccaactcgtccacttggagtctcagctctcgtcctcttcgtctttgtatacacacactcacacactcactcactctgacacctcgcacctcgaccacaaagatacctccaagctcgatatcaaacgtcgttgaaaatcgtcgcacacctcgcccttgctctttcacctccacccttctcgtctcgtcttccgtttcgtcctcttctacctataccatgttccgaaccaccctcaaggcttccaccggcgttctcgcccaggcttctgtcgccaggacctcggtgagtctcgatgtttcgaagcaggtcgaccttggtcgatgataccgtgggcggggactgaccacttcatgtggtgcatcactttgtaggctccttttgctgccagggccgcctccaacttggctggtagccccgtcaccggagctggcagggacaatgtaagcctcgacgtccgacaaagactttaaccaaatgacgtacttcccgctcacgttctccccgcgccctcgtaggttcctaccaagtacggtggtacctacactgtcaccctcatccccggagacggtatcggtaacgaagtcgccgactctgtcaaggagatctttacctcgctcaacgtccccgtcgagtgggagcagtacaacgtctcgggcgagacccacggtaacgaggccgaattcaagcgtgccatggagtcgctcaagcgtaacaaggtcggactcaagggaatcctctacacccccatcgacggacacaactcgtggaacgtcgccatgcgtcaatcgctcgacatttacgccaacgtcgtcgtctgcaagtcgttggacggtgtccctacccgacacgacggagtcgactttgccatcatccgtgaaaacaccgagggagagtacgccggattggagcacatgagttacccgggagttgtagaaaacttgaaggtcatgacccgggtcaaggccgagaggatcgccaggttcgcgttcgactatgctctcaagaacggcaggaagaaggtcacctgtgtgcacaaggccaacatcatgaaggtgcgtcgttgagcgcgtccaggaggttgaaacgtcgttcaatcacggtctgaccctgtcgcgcgcgtatgttgcagctcggagacggtcttttcctcaacacttgtaccgaggtcgccaaggagtacaagaacagtgggatcgctttcgactcgatgattgtcgacaacacgtgagtcgggccgaacgggcttctgtcgccctcgcttgcatcgctgaccgacgacgatctttgcgggacaacgatagctcgatgcagatggtttctaagccccaacagttcgacaccatcgtgtgccccaacttgtacggtaacatcttgtccaacatcggtgctgccctcgtcggtggacctggtatcgtccctggtgcctctttgggacgggagattgcgtgagtctcggtcgtgcggcgatttgatcacggctaaagctgatccgttttcttccctgcccgctcgcagcctctttgagcccggttgtcgacacgtcgctgccgacattgccggcaagaacgtcgccaacccttgtgagtcccgccgtacccatccaggcgccgtctctgcgactccttattgatccgcctcctttcctttagccgccatgatcctctcctcgagcatgttgttgcgacaccttggcttgaacaagcaggccaactcgatcgcctcggccgtctacaaggtcatcaaggacggcaagttcaagaccagggacatcaagggtaccacgtcgaccacggatttcaccaaggccatcatcgagcagctctagagcatggcatagagaggttcccgatgaattgttttgtttgatacaccacgacatgtacaccccccccccccccccccccccgggtggaggtggtgggtcaggaggcggcggtcgatactttgatcaacaaggtccaccacccccgcgacatggcgggtacggtggtggagatcaaggcggacggggaggtcctccccctcaattccagagcagggccggattcgggggtccgttgagtcaacaggagatggaagcgtgagtcatggccgtcgcctctgtctacccacgtaacaatgggatcaagctgagacagagtacgggggcacggtcattgtttttgtgaaatggtgatagtcgtcgaagacagagagacgaatcgacgttgacggtctggccacgatcacccaaacgttcgatcgaggaggaagagtgagtcatcttcgtcgtcatcgtcatcgccccagctcggcatcccgcctccattcctttaacccatctgaccatcttccattgcatctcacctgcttctcccgcgcagagccgaggagatccgcgccaaagagaagaaatcatcctcgtccaaacaccaccgcagcaaacgtagcaaaaagtcgtcgtcgtcgaaacacaagtcctcgtcccgtcgatcccgccgcaagagctattcctcggattcttccagcagctcgagcgaggacagcgaggaggaagagaggagaaggagacggaggaaggaaaaggagcgggtgagggagaaggacgatagggatagagatagggacaggggggagaggagcgggagtgccaggtcgaggagcaagtctgccaggttgccccccgctggagtcgacgaagaggatgaatgggaggtggccgaacccgcacgtggatcgggttcgatggcggtgacgaccaaggccgtcgggatcgacgtcaacaccggagcgggagagtcgagcgccaagagcaaggcagcagatcaagctgacgaggatgatgatgacgaggaagtcgggcccaagctggtcgtcgaggatagtcacgcgccggctaggaagcatgatagtaaagcgtgagtcttagctctcgggcctttccagcccgtcctctaccgtctcgacgacgtctgacccccgcgcgccgacccgacagatacgcccaccttcgaccgggagaaggagccgccatgtctcaattcgtcgaatccggtcaacgtatcccccgacgaggagagatcggtctgtccagcgaacagattgagaatttcgaggcgagcggatacgtcatgagtggaagtcggcatcgaaggatgaacgccgtgcgaatgagaaaaggtgagtcacaccccgcaacccccctgtaccgcagcaaccgggacatagcacgctgacccgtcgaccgcgaatacgctcacagagaaccagatcatcacggccgaagagaagcgagggatcctcaaattgcaagcagaggaaaaggccaagtacgaggcgttggtcagagaaaacttgaaggggttgatggaggaaaagctggcacagagtgccgcgggtggagcgaggcaggggtaaagcacggtcgaagagggtgtgaaaatcgaagaacaagcgggaagccagccgtgacgatctttgtaacaacagcttgtcgcgcgataatagcgattgtccagccagcgatgcggagcttgtcctaggtgtcatagcgatcgtccaatttcaacgtttgttcgcgtcgtgatcgagcgaagcactgtcgagatgcatacgggaaggatgttgcggttcgacaacgcatcgaccgcgatacccccagatgcagatgcgaattgactgcttgcgccggcggctcgctggccactaaggtatgccggcgagggaaggcggttgccgggtccaacagtgctcatcgcacaacgaatcaatagcttacgactggttcatcactgcgaagcggggcttggtccggagttgcgcacgccgaagtacgtaaccgccgactgcacacttcgcttagtaacgagagctaaggattgcccctgcttcatcccttgtacagtcacaaattgcgacagacctgatggagagcgcaagggatcgatcgccaacgatacagacaacatgatcggcgtgcccagttgccctggcgagacgtccgagaaggaccgagtttcgaaggcaacttccgcaccttttaagcctacggacgagatccgcgatcagtttttcttcaaggccgcaaagcggtaaactcctcgctcgctatgagatgagagtgtagctctgccggtctagtgagcgtgagtcctaaactaggggccattaagacgagcgatacaagctcttggcaaggccttcatcatgcgcattggtaagaactacttaaatctatgcagagaaactgtggtattgatgaccatcggtatgttcgcacgcactttgacttcgcaacgctcgaatccgcgatgacaaagagcgttgcggtccgacaaagaaagggaagctccatcgcaatctgcttcgtctgtttcgttgctcatatcagatataggatgggccaattgcgatgtcaattccaaacatcttgacctcccttttcttgcgcttacgagcgagtttcatgatcggggtggtctgcttgaacgtgaccgagaaggcgaaggagagtgcatgtatctttgtgtgccacctcccatcggcaagtcgcccccgtagctaatacaaaatactctgaatcgctgacgtacagaaggccaggcatcgtgcagaatttcttcgccttggcggccgagattcatcacgttcgacttcctagcaattgatgaacactgagtctcgctccagcggttacgaagcactgtacattcgttcgaaagcttctgcgagcagccattcttctcaaatccaatccgccagtccgtcgggctattgtcagcattaacggctcgacgtcgatcatgtcgttaagcctagagcatcacatcgaccacgtgctcatcagagagtttgcgcaacggagatttcgaagcatcgagcgttcgattgacctgaaccacttctcgacacttgcagtcgtaccagaatcatatctgctgcatcggtatacatcacacggcgctttttccaattcgacgcttccggtattctgaaacacagcgcgtccgtcgtgcggctaaacacgatgcacaaggacggtaaggagtctcattcctggtggctccatcgtgcttgctacctttctccgctgctgttggtttgttcgtctgctattgattcatggtgcaacagggcttgaatgctaataattcactagccgccagcccctgaactctcaacgtcggacagagctgcgtggactgattgtcgatgacgtcggctactcgcttactcgcctcgcaatacatcttccggtgcatattcccctctcgaagaatagatcgcgaatctaccactacatagcgtgtctctttcccacctaaagtagagctgtgccctcgcgcttgagcagcgaccaagacggaaatcatcgcgtttcaagacatctgcaaccccagcgggtgtcaaggggtcattcgctcgatttttcatacctcaaaagcttgtgcagagccgcaaactcggtcgatagcagctgtcatgtcccgcgtttcgagaggtataacatgaccatcgcgcatcaagtatcaagtatatatataagggtcaggagggaaaagaatgaaacaaatcaagccgtataaagtggaaaaatgtgtttttattgggtgttttttcttgtgaaactgcttcctctatgtaagaaacgcgcacatcaggcagcggatatccaggctcggctcatcaaggtccattgattagagggaatgcgagctcccctgatgtgccgatctggatcccacccgctctgacacgcgcgctgctccgcattccacttgtccttgtctttcgtacttcatcaggcgaggcgagaacggtctcgcctaacgctcgacgaatgcatccgtcatccgtcatcttcgtccccaactcctgcttttctccatccgtccaagctaagtaaagcaccgcttacgtgcactgggaaaaagaaagcatcgagccgcccgaccgctccgtcagtctcccgcattaccaaagtcgccagtgactcccccagccgaacaagtgtgactcaccttgggggtctcacccgatcgagtgttcaagatcaaagcgacaatcagaccgtacagacccaaaacctcggcgaaaatgaggatcaagatctgtgtgcacgaacaagcgaccggccccgctcatgtcaacaatcgcgctcggctcgacgacgagtgaaaacgtgtgcgtgtactgaccattccgacgaacaacctgggctgctgagccgttcccctgacaccggcgtcaccaacaattccgatggcaaaaccggcggcgagaccggcgagaccgaccgagagaccggctccgagctggatgaacccggtgtacaagggcatgggggattgcaggtcacccgagataaggaccgagacaaccagtccgtactgcaatgtcgtggttaccagggtcagcgtctagtctctcatcccgtggaaaggccgccgcttgactgacaatggcgataataccggccataatgacgggtacgacacacttcatcatcaagtccggcctgaggatggacatggccgagataccgacaccggacttggcggtcccgtaggcggcaccgatgcaagtgagggagatggcggcgcagcagccctattgaccgttggacaagggatggggatggaaagagagcgagggtaaggcgtaggcgaggtgaaatatcgggtattgaggtggaggcgacaagtaaaggcgaacaggcgagacgacggggtgacataattccacgatgtgccagtgccgccattcatcgaacacaagggcagagataaggagattcccatcagcctctactccccaaacgccatgagactaacagccgtctgcactgaccatggcgccgaagaaaggagcgtagacggggcagagatcggaagacatcgttgcgaggttcttcttgatgtgttttgtgtgtggagttggttgtctatcggtgcggtaagatatgttccattgggtggaaagtatttcgaggaccaagagattatggcgatatcgatgagcgatacgggtcgagttgatgatcgatggcgacaacgaggataacggcgaagggcgaagcggcgtgatcggagtcggcagttgagacgatcgcgaatatcgagattcaatgcaaacgacgacggtggataatccagcggtaacgaacaacgtgtgtggcgaaagagaggttgaggttcgggttcggaattcgatgatgatcgtgaataccgacgacgcgaggtcgatagaaaagggatggcgagagaaagggaaagagaaacgatcgtaagcagatgaacgtgcgggaacgagcgagcgatggggagtgagcttacctagcgatttgcttgatgaatctaagattgacacgagactttgactgaggagactcgagttggtttgctagatcgatgtaatcaacagaggatgatggcgatggatgatggtggtggtgagtgaatggtcgttggtggttgatgggacgaatgacggaggcgtgtcagtctcgttgaggaggaggaggagcaaagggaacgacgagggaagaagcagaggaggcagggggggaagaggagagaagctagcagcaatcatcatcatcatcatctcgatgtgtgatccgcggatatacaattacgtaccaagtagtagttggtagaccctcagcgaattgcatccgaatcaaccttcccctcacaacccgcgtgaacccgcctacacccctggtttccgacgagtctctggttgaaacgtcattcgcggcaccttcacagctcatgcgtacgacgatgaacgacctatgagatcatccagctacatgcgatggctaatgacatggtcctcaacgtcgcgttcgacccaatacgacctagtagatctctcgggagttaagacgatacccctagatcatctgacggcaagtctcctggcttggcggcgccggtcatatctcatctactgatcgctgcgttcgacttgaatcacagcagcagctctcttccggaaggcatcccttgctcttattcacagaagtgccgcacgacctccaagatggatccatcagtacctttggtagtggataatggaacgggtttcgtcaaggccggttttgccggtgagtcgcctattcgtgctcgtgggcaacatgccatcttggctatccctcgcgcttctgcgcgagcagtctgcagagctcgttcacgatcttaatcgaccttaccttgccgctgacaccgaacactcgaacctccgcttccaggtcaaaacttccctacccacgtcttcccctctatcgtcggtcgcccgatcctacgtgccgaagaacggctaggctcttcccagatcaaagacctcatgatcggtgacgaagcctcggaccaccgttccttcctccaagtcacccatcccatggaacacggaatcgtcaagaactggcaagacatgaaacatctatgggattacacgtttgacgaaaagctcaaggtggacaccaaggggagaaaggtcttgttgactgaacccccgatgaacccgaagagcaatcggttgaggatgtgcgaggtcatgttcgaagagtacgggtttggaggggtgtacgtcgccattcaggccgtactcactttgtacgcacaaggtcagtccagctcgaactcggcttacaacactcgactcgtttacacggactgacctttccacgagaccccacgtcccgtctggatgctgaccacaggtcttcaaaccggtgtcgtcgtcgattccggtgatggagtgacccatatcgttcccgtgtacgatgggtacgccctccctcacctgacccgccgtctcgacgtcgccggaagggacgtcacgcggtacctgatcaaactgctcttgatgcgcggatacgcttttgagcggacggccgatttcgagacggtcaggggcatcaaggaggcgttgtgttatgtcaggcgagttgcagtgcacggttgtcgtcaacattgagggagggggctagaggctgatcgtagacgtgtatgattggcgattacagttacgatctcgacatggacaagaggttgtcagaggagacgaccacgttggtggagagctataccgtgggtcttactcatatcccatctgatcttctagtcatgagcgtcgagctgactaatttcttccctccgactcgacgctgcgacagctcccggacggacgggtgatcaaggtcggttcagagaggtacgaggccccggaatgcatgttccagcctcatcttgtcgatgtcgaacaaccgggaatggcaggcgagttgcacagtgtttcgcatcagcgatgcctcacagacgaatcttgggctgacttgagaaccggtctcaccgtttcccgctccgctgtagaactcctcttccagacgatccagcaggccgcggtagacacgcgttccgagctctataaacacatcgtgctctcgggtggatcgagcatgtaccccggtctgccgagcagattggaaaaggagatgaaacagttgtatctcactcgcgtgttgggaggcaatgccgagaggttgaaggtatgtcatttaccctgaattggccccgtccgatccgcttggctgaccacggttgcgatcttgatgctcgaccccgcagaacttcaagattcgaatcgaagatcctccacgacgtaaacacatggtcttcctcggtggtgccgtcctggccgatatcatgaagggccgtgaggagttctgggttaccaaggctgatgtagaggaacagggcttggtcagggcgttggaaaagctcggacgtggtgattagagctcgagcgagttgaaagattggaaagtacgaggaggtctggttgtatccatgtgagaaatggtcattgttttgtgccctgtccacccgataccgagcgatgaccgaacgcgctcggctggatctcacgggcgagatgaggtttgcgctcaaattcgatatattcgcttccgtcacgttcggttattgtctaccagctaccagactcggtcaggctttgcgcagacgacctaacggatgacgaggatatgatccgtttgatagcgatcctatggtatcttgtgacaaggtcggaatctcactccaggttcacttcgtataccatgcactatctcgacaagattgtccatcatgtcttctactgctcgagcccctggatgttggccatcaacgggttgacctggctcgctgtcgcttgggcatgcgactcggaattgcgggtgagccttcccatttcgaccacttcagggaagctggggttcatcaaatgacagccgaaccgtatcacagatcgctctcgttgtccagcaacattttcgctgccgagcgaatcgagaggacgaggttcagatgcccacggcagcgcagaaaaagggacctgatcatatccgagctgtcatactcggagtcggccttttgatcctgctcattgttcaggtcatcacgatcatcgcgtggtccaaatctaaagccgggttcttggatgggtggctcttgctgttcctcgtcctgcagattagcaacgcgctcgacatggtacgtagatagtccgacatcctcgtgcctgtcttcagctcactcgcaccgttacctttcccacagttgttcatatagatacaccctctaacaaaacttatgggaggtagacctatcgacttttgggtccggccaatccgaatagacgggcaaggtcgaataaagttcgcatggtgggacgacccggcgatccaattcgcctgcacatctctcgtcgcgctccccctgtgcggtttggtcttcacctcgaaggaagcctctgtgcatgatttctggacgagtctggctcttttgattctggtcattagctcggctaggtcgtcgatgtttggtgcgatcccaaagttgcgaaatcagtttctatggctgctggtctacgtggttcgtctctggatttcgcttcgacgtcctcagttggcaagctcacatttcaacgagggcttgtgtcacaggcgggaatcgctttaacccttcttttgacaatctggatgataagccgagaaccggctcaaaggcctggcaaggcagacaaagctcagggaggccatactcagcaccttatcggtcctaccgttctgagatcggtgcttggcctggtcggtgtccgtgcagcggcagaagcagtcatcgggcaggtgagtggtgtgaacgtctcgggcttggtgtgtagaatgcctcaccaagtctttgttgccggtcgttgcgtgcaggtcgccgtgttggtccgcttcgaccaagctcggtacggcacggaagattccgccacgtctgacgggataaccttcctcccctcgacaaaggacaaaccggcatccacagacggacagcccgactcaagcatcgagatcgtgcccatacccggctggaaagactcgccacgatttagcaagccgaccttcagagcgggattggcaggcgttgctttcggctcgacctgcgccatgctcttaattcccgaacgccaggcgacgattgtctgggcatactctggtgccgtaggatatctgatctctgtcgcggcgagtctgacggttcaaggccgctggcaggaattctgggagtacgaggagaggaattttggctcaaccggaaaggtggaagagaaaccaggggccaagtctgatgtcggcccatgtaggccatcctaggataaagaacgaaacgtaaatcatcgttttcgcagaattcattcggacgctcgtagatgacatgccagagtccgtgaattttgcgcgcaaggcgaatcagtagtctggactgttaaccgatccaagatgacgaacatggacagccccaaactcgctgtgtgcatgagtgagcgcgctctcccgccaacgtaaatgcccggtaaatcatcatgcgaaaaaccgaagtgtacaacaagtcatcaatccgaaagcatcaacgcgcgaagcggcccagcgtagcagtatacgttcaatgatgcggtaaaaccagtccagaagccgaccaagatgagggctgaatggaattcgacgtgggtcatactacttgttcttggacgtctcgccggcgacttttttagcctcttcagcgttgaaccactgtgaacaagtcgcaggtcgtgaacattagcatacttgcgtccgagcgcacaagcgatgcgcgtttggggaaaactcacctccaacgtcttgccgagcgcctcctcgaccccccagatgggttcgtaccccaacaacctcctcgacctttcaatgttgaagtacctcttctgcgtggcaaaattgaccctgaagcgagtgaacccggcttccttgcccatcaaccagctccacccttcggccaaggcggcgagcgcgagtccgatggccgggggcatcttgatgtggtaaggcgcgatgtggttcatgccgcggtaccagatggcccggttgaaatcccaaaagtacaggggttccgagttggtgataaagtacgcctgaccggccacacgaagttcggggtcgatgggcgtcgacatgatcgcactcggtccgtcgtcgccctcggtcttttcgctcgatttgagcaaggcgacggcggcctgcttgtcctgctccgacgtgtactctgggtcggtcgccttggcaaactgatccatcttggtcctcaggacgggttgaaggtcattgtcctcctcgtcgtccaatcgcttcctctgcctaaacctttcgtcggctcgtcgttcctcttccgtgggtttcctgatcggacccagaggacgggcttccgacgtagggacgcggtagtcgccgaccgtcttgttattctccgagagcgggaacgtgaactcgtacggcgagacgaccctgccgagtcgatccgacgccaacaaatgggcatgagcgacgttgcccacgtaggtccaatcgaacaggttctcgttggtcccgatctggaacttggtctgaccattcttcatgacctgttgcaatcctgtcaaaagctgacgatccccctcgccaaagatccctgcaggtctcagcgcacacgtttgcaattccaccccattggcggcgaggacgagtttctccgcttgtgccttggtctcgttgtaagcgtccagggggacctcgggcacttccattcgttcgtccacatcgacgagattttgcgtcccattgtaaacgacgccggcggaagaggtgtagacgagtttacgcacgcggtgagagagacaagcgtcgatgacggtctgggttccgacgacgttgactttgcggtaaatctcggcgcccataccgtgcaccggcgaggccgtgtgaatgatcacgtcggctcgagactgcgacgtcgaaaagcaggggcaaggtacggttagcaacattttcagatggaggcggtgtgactattcggagagggaggagatgcgctgcgagactcgccttagtgatcgcttccgagaggtcatcgggaaaggtgatgtctcccgtatagaacgatacgtttctatcaaaggtgcatccttgtcagcccgagtaaactaacttttgtctattctcctggctttccacctccgcacatctcgtcgtactcactcgtcgaaatgtcgctgaacgaggtcgaacacggcgaccgccttttcaccccgttcaactagctgttcgacgatccgtcgaccgaggaacccgcagccgccgatgacgaggaaagattcttgcgtaggtgcagaggtagccatcgtcggaggtaattatcgatgctagggatggggaagaggatgatggtcgaatgtgaaggctgagattgtacgataactaagaaggcctgtgtgagtatcttgatggtctcttcctggtcgttgtcgtgagtgtttgtccgctggagacacgagcgtgcggatgcggggctctttgactgttgatcggatgtaaattggtcaaatagcttccgtagaccatcacctcggcccgagaagggggctggggccggcgcgaagcctgtttccccaaagaagcgcgatcctgtgtgacgtgatatcaggccatcgatgccgtcatatatgacgttgcgcttgtacttcctctcgtcattcttcgtcatcacggcatcgggcgtggcgtggggcggggacgatcgtaccacttgttcggcggaatttgggggcgaaaaaggttgttttgacgttggcaaaggccgcggtggtcccatcgaccaggtcaacgtcgacacactcgatcgagaggtcgttccacttgttcgactatcctctgcccttgacccccctactctcaagtccaaccacgcctctcacactcgtctccgatcggatcgggaacacagcgcgttcgaccatcacatcatcgctctaagcgattcaaacgtcgaatctctagacacaccacatagatagctccactccgctgtcatcacactcgctcttacattcgactcttttgtctactttcacaccccgatcgccaccctcaacatcatcacgaccactacctcttacttctacctgatatacattacgacacactcgctcaactagaaatcttcgatcgaacggccctcatcatgtcgtctttcgtgcagacccacgcaccgctccttgcggatcactttggtcccaaaaactcatcggccgtcttgaacgagctgtatgccggggtcgatctcaactcgctcaactggttcgagcaggcatggggtgagtcgaggcgtcatcggacagatgtttatcgcgatcgaggccttgaatgaactccgagctgatccgtcatcgtcgttggcgcgtctcatagtcaactggtacatctttatcggtaaccctgtcatcgcgaccggtttgatgtcgttcctcttgcacgaggtgagtcttcaggccgtattacatgatgcccgatccattccggtcgaactgatccttacaacctctatcatcgctctcgaaatcgtctctcattataggtcgtctactttggtcgatgcctcccctggatcgtcatcgacaagatgcccatgttcaggaaatacaaacttcagcctaccaaggtgcccacgaacgctcagatgtggaagtgcaccaaggccgtcttgttgagtcatttcaccatcgagttgcctcaggtgagttttgcgcgcatgcgagcgtcgtcgatcgtgaaaggacgctgacacgacaccggtacatcgcgcagatttggggattccacccgatggcggaatactttggattggccacgcataccgtgcccttcccctcgtggactaccatcatccctcagatcgccctcttcttcgtcttcgaggacacttggcactactttgcccaccgagcgctgcactacggtccgctctacaagcatatccacaagatgcaccacgaatactcggctccctttggtctcgccgctgaatacgcacaccctctcgaagtcatgatcctcggcgccggcacgatcggcggacctctgctctactgcctcctccgaccggatctgcacatcatcaccgtctacatctggatcaccctccgactcttccaagctgtcgacgcgcactcgggctacgatttcccctggagtttgaggcactgggtgcctttctgggccggagcggaccaccacgatttccaccacatggcgttcaccaactgttactcgacgtcgttccgatggtgggacaagctttgcggaaccgagagtgagtcgacgtgggcgtgtcggatccctctttccctctcccagtgaaaggtcgcgacgagtcgacgcgacgctgtttcgttcgctatcccgacttgttcgcccttctgcgacttgtttgcggctcggacagaatcgtttgcgccatgccacaacgttccgtaccgcgacaccaatagctaccttgaattttgttcatcacgttgctgacctgattccgtcttcccccttcctcgtttagacaagtacgaggcttacaaggccagggtccgagcggccaagccttctgagcgggaagcgaccgagaagaaggaactcgaggccgtcgagcgggaaggactcgtcgccgagcgattggctgagcgaggctacggaaaggccatgatgggtgttcccaagggcaagctcgagtaggagacttgccatgctgcttcggctttggccccggcgtgccgcccccgcccaatagatgaaaagagacgcgatgaccggttcgataggattgtacaacagcccgtgtcggtcgtgcgttattcgcatatatactcatacattacacacagagatatatcaggatcgcatagtttacgtgagagtcattataaagtcgtatcaaagtcgtgtgattctcagctacttcgcgtgagactcgttcgcatgccatttaaactgctccgcaggcggagcagaggccttttccatatccttgcatcaatgatttctagctcggccaccccgaggacctggtgaaggcgtaggattcggaaacctgagcttgacgaccggattgtcatggtaccagtccaacacttctcgatgcgagaacaagaccaacccccttcgcgttccctcgaaagctccaactccgtgcaccaacaggtcggatgccatgacgaccatgtctccgggctggtaagtcatcctcacggcgtattcgccggacccgacaatcagatcccctcgtctaaagccaccgacgacggtcatcaccgcacatcctccgtccttcttgtccttgtgagggtggaccgcacgattgatcacgacggcgcatccgagaaaggtctgaccgggtgcgtgatcgatcgcagaggccatccctgggaactgcgcagagagaccttggaaacactgacggtactcgtcgtgtaagtctgggaagagtcgttcggcgagttcagaagcgacgttctgcagaggaacgagaccctggagaaaagtctgtgcgacgttaaatttgcgggcggttcctccgagagcatgactcgagacgagtgatttgtttaaccagcggtacttttccttccaaaaggcatagtgaaaggtcccgctcgtgctcttgtctacggtttcttcgggatcgtatcgcttggtcttttcttgcgggagtcgcccgccgtccaaacaccacccctcttcggctcgttggcaatgttcgttgagcgcatctgcgccacggaagtagcccttgattttgtaacagacgacctgctcgtcagaggtctggatgatgacgtggcctcgatgacgacggagattggggatgaccttcatccagtccggagacatgtttggggtatgttcggcctcgagttgacgtagggtgacgggtagggtgatcagggtgtgtggtttgttcagtggaggcagcgatttgtgctcgaagatgtagggcgtatctttcgtccaatcctgatattcggcgtgatcttcaacgtcgtcttccccgcagctgctgtgatgtgggctcctagccgttgcagcacggttcacccagtcatccgagtccgacatcaaaactccctccatctcgtgattgctctcccgacgccgacgcagatgacgaagaggagcatcatcgtccgagcccggcgaagcgccgcgctcttcttcgactcttctttggggtacagagtcgccagcgattgggttcgatcctttcgtctcgggatcgggatcggagagactttgggttgactgcccttgagcaccttgtaaaagtcggacgttgtgtattcctttttcgctcgggtacgcgtggctagcctctgcatgcgcctttgatgtaccgctttgaccgcctcatggatgtcgtcgattttctgttagaccggtagccagcggtcaagttgagctttcagtacgattgaacgattcgagtaggggcgatttccgcaacggagactttaactcactagagcgacctttctgacggtcaacatccttttgaagccacaagcctggtcatcccacttgaagtgacgtttccagtctgcgccccaggccgcctcgaccacgtcttcaaacaccttcatccgagcttggcggtaagccagcaagtgtttgctactgatcggaacatccaagagttgatgtaattgtatcagctgatccatatcatcctgaaagtgatcggccagccagtcgagcacggttttcacgtcgacatagtcatcacgaagtcgtttggcaagggctttcgcaccagcggtggtgagtacgatccagtattgcgtcaaatcgggtggttgcaaatctgacatgatgctgcaaaattacatctctatgcgattatcgtagtgagatcatctgtgcaaggtatttggggtgtgaagaatcgactcttttgcttcaagcttgggtggatctgaatcatctgaattctacgattctctcgcttttgtgagctctgaaccatgggtgacccaggtttcgcgagttgccggctcgcgacttagcacgaaattgagttatttgcttcaaccaggacctcgacctccccccatcatcttctctcgtagaccagctcaagcctacccattcgcaccgagtccgccaggagcttagagatagttcgctgtttcgctttatttccggaccgggactccctgggtacgatattgagaaaggtattcggtgcgagacaaccggtatctggtgcggtaatccttgcgtgcgaactggctcgacgagtacagcacgggaggtccggtgacggatacgttcaacgacaaaaagttgtgggtaggttggtccaatgtcgacaaaggttgaaggtgtctttgctgaccgggaatatcgtcggcaacagtacaagctctgcttagctgaacagaaaggagggtcttgattgctggacactgtcatcgaccggcgacacggcggtgcgagtcctgcagaatacgaccggcgaccagctgcaagcagtaatctctgtaggattcagcgttcgcttcggttctgagctatggattacgcatcacctaccgttcgaggcctcaaggtaagctagtccacaggcactcatcacgcaacgttcccggggctgatcgaccacgttcatccggccattcttcccgttcgtcgtccttttcatcccaatccggtgcagccagctcgtccgaccgctcccaaagcaatcgtggacaggaacaaccatgaaggaccggtgacgtgcttgtcgtggagttgtgacggccatcacctggcgaccggtggtgaagacaagacggtcaagatttggcagttcaaggtgaggacctatcctttctcgagagctccgctcctcttaatgatgtgatgcttcggacgagatctgactgtttcgcttgcggtcttgcgttcccacgacctcgtcgcgatttcagcacggcgctgcttcgcctttctccctcgtcaaaacggacgactcgactatcctgcagagtgccgaagccggagataatctgggagaagtctcgcaatctcaatcatccactaccgcctcttctcccatcacagccctggctttctcgcctcgccatccggacatcttggcggtcgcttcgcatgtcgataattggaatcccaatgctcatggcgtggttgggggcttgggcggggtcgaggtggtgcatgggtcaggaagtcggatcggaagagacggttcgagcggtgaggagccgagaaaagtaccggtgcagagaccaagggtgactatctggaacatcaaaagtgagtcagcggctggttcgaagctggaggccaggcttggcgcctgactgacattgcctcactcactatattgtgcagcgcgacggcccgtctccaccatcctgctttcccacaaccccgtctcgatgacgtttcacccgtcggcatatcaactcctcatcgtgtgtatggacaagaccgcagtcgattacggggtcatctgttggcagggagagatgagcgtcaacgctgaatccatcaacgaggcgtacggatcaccgctggaccgcgaaacccgacctaccgatgctgcagattccacctccgactttcttaaagatgacacggcagtcgatgcggccgaaaagcgaaaaagaaaagaggacgtcgagtccaggttggcgcatcaaaggcgagccgaatctgaaggtgatgaaggctggtcgatccgtcgggatatgaagctcgtgctcaaggagcgaacggaagagatgcgaggtcgtggctttgatagtggtgttagcgaggtgagtaggtcttgaaggttctgtgcatcagagaccaaagcgctcaagtcagctttcggctcctctatcgaatagctcaacggtgcttgcttctcaccttgcggaactcgtctctacactggcaaccacgatggtaccgttcatatttggcattatcccacgatccctgctgcagaaagttcgcttcgcgagcctacttctaccacttctatcgaagatgcaccttccgccgaggtcttgccgacacttgccggcgtccccgatgcatataatgaggattcgaccggtctgctggacgaaacattgaatatggcagtcgatgccgatcccgaagccgctccaccaggcgagaatggcccaacgacatcggaggatgaacagcagccgctgctgccttcttctacgctgctggatcactcggccaaggcgataccgctggtatggttaaggtgtatcgagaccaatcaaggttgtgtaaactgcatcgagatggacccaaggaggaggtgcgctcagcgacgcgatttctgggtgctctgccgacacccgctcactctgttcttttgctgaaggtttttcgtcactgggggctcggagggtctcgtgaccgcttgcaatcttgcggacagcgttccattcatgacttttagcacatatacgtaagtcatgggagctgcgacagtgttcaccagaaggataactcacagccaaatacacagcgaggagatcaaaagtgctcgtctgagctggcatggggaatacctggcgatagccggtgccgaccgggtcatacttgtcgtaagtttaatcggtcaaaggcgtgaagtcgtaaaggtcgtaatattcaaaatctccatcaggtggctaccggcgacggtagtgtcgttcatcgtgtcgagaccgagggtcgggtgcagcatatgcaatggtctcctgcacggctcgtcctcgcctgggttgctacaaatacgacatccgcatcagcgtcaggaaaatggtattccatacaaatgtaacaatcgacacgtatcgggattatgaaacgtcgcagccactgcttattcatcaatgacgccagtaatgacgcgacccatcgaagtgaacgttcccatctgaacgtgtagggcgccaatgtaagcagcccaatcctgtctgagaggattgatcaggctgtctcggaacttagtggtatctccttctcgaacatttgcactgtattcttgggtaaacatagtcccgacagcctttagcagacgtctatcaacagacatctgccagtcaggggttgcatagtcgttgatatacgagaataagaatggcagagttacgatgttgacagatatgtaaagagcacgaccttttccccctccctctctctaaatgatgattcgcttctttttccccacatcatgatagaagcgatcaaatctccctgtccctgtgctgccaacgacgatcaatcaccatatcgccaaagtatgcgttcaagcgacgacggtagcgacgaccacgaccgacggtgacgaccgggtggatacgctttgttctgcagcgacatccgcagcgtaagcgtacagagagaagcaaacaagccttcctttacgagacggaatcgtttcccttgttttgtgatgatcaacttgatcagaatgacgaaggggtaaagggaaggcgtaaaggccacagtatccaccgagatcctcgggttaagatcatactccgtagggtcctgcaacgtcattatcgtcgccatcgccccgatcattaaagaccacctgctcagtccgtgtttcaatgttctcggtggccatgttgacatccatcggtctcgccggaggcagtaccgtggcgtaaaacgcctctagcgcatctcgatcagcgcaaaaagtcaacaaatcctcgcgcaagcgatccgcttgttgttgtttcgaagaggacgtggtcgtatgctgggattccgctcgaaacctggatgacgctgagaagaacagtcggttatcgctccagaggaagccttccgttccacctatacattgtactagtgccaagccggatttgtgtacgaactgcgagtgctcaaagatggcagcttttcggtaagaatactcgacttcgagatcgtccggatatcgatatgtagcctcgacgtccagtacgaagtcaaatttctgagtcaggatggcatattcgaaataattggcggttcggaattgttcagggatccgctcgtcgagatcttcgatggttggcggtgcgagagctagccgtatggggaagcacggtcgatacgcgcatttttttccgatgtcctttatctgttcgaccggggcttcaacaagcctgagtccatgtttctcggccaggaccgaccatcgctgtcgcatgtcatcgagtagcccagcagtcactccgatccagttgagttcaaaatggaaactggcgttgttgagcgtcagctggtgttctacgcatccttttctgtaggtacgtacgcattggttgcattgtggatgatatcagagtgcaagatcgcgacctcggctcggtcgctgcgtcgttggggatcgagatccaggatcgtcgtctgactcatcttcactttgcgtttgcgctttggtcggtgcgtcaacggttcatgggtatttggaagcccatatggcttttcccccttcgacccgatggcagtatctgtgtggagagcgcgaccgtctaaaaaccagcccatgcctttcttcttttgaggtgtgtctgcatatttttgccctagccgatagtagtaatatctgtgcaaagagagactggttagcaaaagaccaccagaccgactgttcgtaatcgttgtttcgcacccatctaaaaagccgtggctaccgctgcaatgctctgatgaagatgcatcatcagctttgtttttcgtcttagggtacgcacgaactcacccaaaaggccctggtcgaacagcctccgaccccaatcgacggccgtgtccctagtcttgatatcggcatacgagccaagtagccagctcacgaaatcatctccctgaaaggtgtctgagtaaaacgtcttttgccaccaacgatcattgatacgcagtccgcttgcgggtttgcgcatgtcagaagcgatactcgagagcgatgctgaaccaatctcgccttgtttctctggctttccatgggttcgggatgccttgttatgtagcgcttcgaggtcctccatgagccgcgcatctgttacacatgcagacggtgcgagccaggtgtgtaaaagccgtagaggcacattattcgcttcatctccactgcctttccagcgatatcgactgataagctcgagcaggcgggtagcgccggtgatgtatatctcttgctcgtcgaaggtctcgcctgacgttccttgcgtggataatggggccttgtccgatgggatcaatatgaatctggtacgccaatagcgcagcgcttcggtcaatcgatcttcagcccctgagatcaaacgatcaaggtagttgaagtcatagttgcgagtctgaatggtccgcaatcgttccggcagctaccggatcagcaacaacgtagatcctgcgtagccaagtccacttaccggatatctgaacattgcggtaccgagctcgtaagctttgcgctgccttggccataccaggcatacgtatttcatcgacggagtcgcatagtcgagacgtcgagtgtaattgtgtacttcgagggtatttcggttgtccatggcgaagtccagtcgatgaacctgatttggcgtagacaagtagagcggtccctgagcagccttgagaatgtcggacgcgcccccgcttctgatacccttgacatcgcctctggacaagactgtgccgcggctagccttgccatttgagactatgaattggaaattttctatgagaggaggcccaaaacgagcgtgttccaggtgggtgatattgagctacgcaatcaggaagtcttggtataagaacggcttacgtgaaagtctctgggaagccatctctctaagcacttctataggcaaatcccattgcttcccttgactgggcggccgaagtaggaaggatagctggttcgcttgacaatcgaacacgtagagctgctcgtggtactgggactttaattcctcttctttcggcaccatgtcgctggtcagaggcagacaggccggtgcacaaaggctgtcccatttgacatcctgagtgaaagtcggacgaggaagtgcgtgttgccatcgccttgccttgcttgccttctcgatgctccgtgtgcgcggtcgacacggattgatgctactcatataggaccgcttgtagctgtttccgtacgggaaggatgatccgcctctctgtgtcggcagagagtaggctacctgcgctggaccctcactgaatgattgttcacgctcagcacgcgcagaggaaaccttttgtgaatcgcccgctggatcgttggacttctccggaggggaatcaagctcaaggggggcgctgcgccggcgagaggtacggcgatcggctggtcgacccttgataggaatggcgactggttcaacttgcgaagtaccaaggacttgtgacccgccgtgaacctctagcagtttatgactggccgagccagcgggctgcatgaccttgttctgagaattaaacacgttgaccggggcgtgcttttggtttcgatcctcctttgtcttgatcttgaccaagccatcaatgtcatggagctttagcgaggtagtctcgagcacgacctgccttcctgaggaggaggaccccgttgtcgttgcgatcgactcgacggttgtgatgggcatagttgggttgggtctcaaagtcaggcctttgaacagaccggatatgctcgacagtgtagaccgactgatcttgctagtcatactcctcgccggtgcatcgctgcgaggcgagtcgggtcctgcatgtagacttgtagtagagactaacgagaggtcttgcgatgagcggcgtaatttcgctctaggagtacttcccccggccggcgagcctgcgatcacagcggcggtttcggctgtgaccttgctctccggcggtaagcgcaacttgacgggcgttccgccttgagaagaggctgcaatgctctggacaacctccccatcgcgatttctcgttccaccagtcgtcgctccttgcgcccccttcaaacgactcggtcgtttcgataggacaggcctgggcgtcgcagcacctttctcgctagttccgcgagatgccccaacgtccaccgacaaagctggcgtactaatgccgggagaaaggagctcgcagggtagtgacgtgttcctggctgtgaattccccgtttgagaagatttgatcatcaaagtactcgtgcgctaccctgcgcgaagtactttcgttggcatccgagagcggccgaggggttgtatgacccgacttgtccttcccggagactggcttggcgacttccggttcaagaagaggtagcgatagtgttgtgagatcgtgatcgattacgccgagcatctgaatctcgtgcatcttgcatcgaggtacgaatcggtcgttacggaaaggcttgtcgtatgagcgcgaatagaatgagcaatagacccagggagccaaagctataggtacgtggaaggttgtgagccgattattcgattgtgtcaatggcagaaatgtatacacacagtaatgttcctcctccggccgcgtttcgtcctccggtgcatcatagtaaagcacatcctggagacgcccgaaatttgccgctcgaaagggacccgcctctttactttcaggcaatcggtggctcatgaagctgaatatcggagtcacgtggaggggcaattgggcaagacacacgagatctagcgtgatgcccaaatcaagcaacctctcggtcgttaggcgtagcatattcttgttgactgcaaaatgcccaactcccggagtgatgaccaagattgagagacctgtccgagagagatcgcggtcgatatatgattcatcgaacggatttaaaaccaggttcatgcattccaggacgttaccctcgaaggcctgttgcgagatgatactcagttaacctcattgtcctttcgcccatagcgcattgtcaagtcgcttacgtatcctagtctacccatgatcttgacttcggccgccttgtccgcgtcgatgtggtagatgagcagtatctcctcgtgtgtttcaagcatttgctgcttgagaattggcattatgctatgccattcgtgccgcgtttcaaagtccacaatgaccttgtaaaagtctttgtaatgaccgaggtacgggtcgtgctgaagcgcctttagataccgaccctcgggcgcaagattcttgaggtgcaatatctcggcggcattgtaaaagactctagcgaagatgatgatagtgactacatgattcgcttgtgtgtccttccatcgctgaaacaattcaggaagaaagcctacagtgtcaagcaagaaagttcagtgtcgtccatccttcgttaaggacgggatatcaggaatcccttcttaccataaagagccttttcgtagtatcgttccccatcctcgtcgaaatcaaacatttccttgcatagctgcaggaacaaatatgactgcgcagacttgcttcggaaaatcgtcttcgtggtagatgtgacgtgtccactggctctctgcaagactcgacaagtgaagatgagccaggtccacgactcgacgggctggcacaactaacccttctccccttgatatagatgttcttaacctccgctctgatgccagcgaactcgactttttgtctcaaaaagacgcatttatcctcgaggctcatcccaagcctccacatgtccgctcgacctagatattgtcccgtgaaatagagctcgataaagtcggcttctacctcagacggctcgacttttgtaaggataacttcggaacgattgggtagaaggaacgcttgggaaacttgttcggaaacagagagggcctaggaaaagaaagagagatggctcaagctccgcactcctcgacgaagactcagcaataactcacggccgtcagcctgcgcagttgttgttcgtcgttgcctttgagcttgaagagaaagttgcccttgacccgatccttccttcgaacggtctgatctgcagatttggctgcgaaaggactctcccctgggcctcggttccttgcagtagatgcagtatctcttcccgttgcaatccgagccggtctcacttcgactatatctcccggtcgtccccacggtatcttgctgatatcagtcacggtcagggctcctccaaagccgtcggtagaatgaatattgatgctgaggttactcgaacacgacgtcttgcttgactcttccactttgggcttttgaatatcatcaagggtgttcgggcccagccccggtcgagcacggctcggaaagatgcctggagcataccgttgacgagcgccctttcgaggagattgtgcagggtcgttgacgtaaaccggcttattgaagtcgtcattacctgcagcataggacagcgaccgtcgtcttgtaggcgatttggtcgtcatgttcgaccaagtagtttgcagccaaccggcatatcaaataacgtgtccgtagttgcggcacgatgacaggatcgaacgacctgggaagcagaaaggcggcactgtataatactgtacagcctgccaattcgatcgttgcaaggctggcggatatgcctatgacctatgatcctcaggttgactacgattcagcaacgctcatgactttgacctggcctgcaccatttcgctcgacgccgaagtctccggaagcaaaatcagaaccacatagtagtgagagacatcgattccttgtctaggagtatggatcgacacgcaatgacccgctaacgattgtcatcccgtacaaacccccggaatagaaggactgctcgtccggccactgtgagttatcatcgacagatagaatgaaaacaggcaaacagtatccaaagggggttggcgtagtagctgtagaaagtcagtttggcgtgcgagggaatcgaactcttgctgaggcatcccaggtttatgctccgtgccccgcatgatggctgacagacacaggcacgtttggggccggaacagactacgccagtagaccttggttgttggattccagtttgcgtgaacaaggacccgctgttgacgcgtttcgagctatctcaaagcagccaacttgagttgcacgatttacaactggaaggccgtgtcagacggacctacgaccatgctagagcatgatctctcatcgagtgtgactagatacgcaggactttgtagcctgggaaaccatgcaccccgacaagtactgacattgcaagttacagatcgagctccttgcaacgcaaatccagcctgatgcaatgcgatccacaaatcacgaacagttttgaaacgcctcaagatacatcaatacccttagccttgcagaaaaaacttgagatcgccttccgcgacctgctccatcttcagaatcgagggcagacttgcgtttcgtcgtcaggccaaagatgattccaggaaacaagtcctaagtcggctcgaagtgcgccaccgattggtttgcgggtatgttcgactgtttcattggttcgattatcacaaagaacagcgctgcattatcgatatgtagtagacgcaacagcctcaccgcaaggtaagaatcgctgcgagctgcctgatgacagaagaaaataggtgtcacacgagagcgataggtcatactgacacagcacgccatgagcaactctgcacctacgcaatgcagcaataatgcgtaaccacgttggtagccatggataaggcaatcctggcttcaattatcaatctggccatgcaggagatgaaggagttagccgaagagtttgatgctcgctgggttgaaagcgctctaggaaccgcatgttaggccgctctatgtcggagatgaccgacatcagtttccggatgacgtttccttcgtctcatacgtcgcatgcggtacagggttatgggcaatctcgatatcaagtgttataggccacagtccgacatattcagatattgtcgtatactaagtactaagcactactctacataagacacacgtgctcgcatgcgatagctcataacccgtcaagttgacgcacgcctgtcttgacctgttcaattcgcatcgaggagcaatacgacctctttgcgcagtggagataccctcatcggcgaacgagataccgatcgtgacgagtcagataatctacacctcagacgatacaccccttataatcgggtgagatacgctcgccgacgtacaagatgcaagagaaaccatctccccccctggtctcatctagcattcaggagaaatcggcacaaccgataaaacataatcatgtcgtttccgatacctctgcaccacaccaggcccgatcgaagaaactcgcctggatcattgctatcctcgctggttgtcagctgtaccgatcttttggcaacctcgtgaccgaaccctggtctctttctggcaaagacaaggtcgaagatggctacgccgccggtctggccgataaaggttggaagcttggcttagaggatgtagatcctgcctggctggaagctatcgatcatggcccacaggatccgatggagaggcaccgctccggtcatcacggacatcatctccaccacggtcaccacggtcatcacggaagtggaaaacatcgtcacggctcccacacgatcggacccaaggaagctgaagttctcttccttaaggtccctaataatgacagtgttgctgcgtgagttgcgttggaggcctattactagctatcttgaatcgagctgattctcagtctgggcactgatagggcttcaaaacgatacaccgcatagcaagtctcgtatcaccaacgacttgtagccttgtatagcactaatacccacactgcccatagcccacatctcgctgggacgggagaagatctcttctctgctttgactttgaaagcagagtatgagaagtttttggggatcccttactcggcgccgtacgacaagattttcccggccgggacgcctgaaaatcaggaagctatccgaggtttgaaggacaaggacgagcctgaagtctggatcgacactgtgagtccatcgctatattatcagtatctcacgcttgctcatgcttcaatgacatgttcgatttggcagtactaccctctcatgaacaaacccgtctcgagatcggttgatatcttgttacccggcggaaacggggccgtggaatggtcggccaagctcagagaagacctcgtcgagggcgaccctgactccaagttccgtgacgaggtccctacgtttcatggtctgtcggtttctggaaacgtaacgggcaggatactgtttgctggtgagaccaacagcatacaagaaggtacatactgcggctaaccgccggcgcgaatttctaggctacgggagcaagcgggactttgaagccctcgaggcgaacggttacgatctccgaaaggagccaacaatcgtcctcgtcaagtacggaaaagtgtttcgaggactcaaggttaaagcagcccaagaggctggagctatcggctgcttgatctactcggatcccggcgacgatggcgaaaagacgatcaagaatgggtacaaggcttacccggaaggacccgccagacagccctctagtgttcagagaggaagcgtccagttcctgagcagttatccaggagatccctctacgccaggatgtacgtcctccaggaagcatgactcgcataagccctaatctcatctactttctgctcttaacttagaccctgcctataagaacgctacccgcgtgcccggtgggaacttcccggagataccatctcttcccatcagttacgaagatgctcttcctcttttgcgttcgttgcaaggtcgcggacgactcgccaaagaaattggggacgactgggaaggtggcttgaccgaggagaccgagtactggacgggaccgagcgaaaaggagatccgctttgtcaacgaggtcgacaccaaggagacaccgatctggtccgtctttgcttatatcccaggccacatcaaggtaagctatggcgaatcatgggatctgcggaaaaatcctctaaatcatgcatgccttcaggacgaggtcgttgtgatagggaatcaccgtgacgcctgggttctaggcggagcagatccatcgtcaggcaccgcaactgtgcacgaaatcatgagaggtctgtcggagctgagacaacgaggctggaaaccaatgcgatccatcctgattgccagctgggacgcggaagaggtaaagggctagagcccagaaaagccgtactgtcacacattgatcccgttgacttgaaatagtatggcttgatatcttctaccgaattctgcgaagatttcggcgaatggcttcagagtaatgtggtggcctacttgaacatcgacgtctcggtatcagggaacaatttccatggttcggcttctccttcgctggccaacttactgcgagacgcagccatggcgatagaacacccaaatgattcaagtcgcactctctgggacatgcaagatggaggagactggatgacctacaatacggaggtgagaggactatcgctggaagatacctcggcttccagcgtgaattcgattggcatcaaagcgttagggtgagtggattactagtcacaagcagctgtatcattcgagcttgactgacacttcacctgtacagctcgggctccgattacacggcattcctacagagattgtcagtgaagcgcttatgagcgtacaggctctgggattgtctgctgaaaatttcctcatcctttcagcgggatcgctagtacagacatgggctatggaggcggtcccaatgacgctccctaccactatcactcgtttgtatctgttgtgatcgcagaacagcatcgaggagctgattgcgaaaccaccattcaggatttacgattctcatacctggcaaatgcggtatggtgatccaggcttccacaagcacgctgctgccgccaagatgctcggtcttatgagtaagtcatatcgttctgacaactgttcggcatagtaccttggctaaagcccttccgactggtttagcattgcgtattgcggacgcgatagtccttcccatcaacttgactcaatacgctcaagacttatcattataccttgccaagtcagttaagagtaatcgagcgaaggtgcaaagaagctgctgaagccaccttctctgacatatagggttgagactatttctgagagccagaattactccatcgactttagcaaacttaggcacgcaatcggcgtagcacaagacgcagcgctcggactgcatcgccactcgcaagaggtacttgaccgtctttcgaagttgtctccccgggcgggcaaccctcgtacaagtcttgggtcgaggaccaaggccatcgttaagctgctgaaagaagtcaggtgcatcaacaagaaactggcaggtttcgaatctggcttcttgtcgagtgaaggaatcaaagagcgggaatggtacaagcacaagggtacagcccctggaaaggtaagggtgtggaacgccttctgggctgaacgcgcgctgattgctgtactgcatccggtccatgatcaaccgtagtggcttgggtaagtccccgtcaacgataatcagaaagtcgcagagcaacgcagctgacagcctctcgcttcgcgatgaccttcatagctacggtgcaaccacgttcccaggtcttaccgaggcgatgacgatcgacaaggatcctgcggcagcgcaacaagaagctaacgaattgacggatttgatcgaaaagatggcaagccgactgatggcttgacgagtacgatcgagggcactctgtcgattcacgctggaaccgcttttcgatatgtacaaatatcctgtgcttccattgaggtacaacaatgatgagagactagtcgattttgatgtccgctacatccgcaacaggagaagccgattcttttctcccgccgttttctgcacgtctggagggatcggttgggatttcctgcacattagacaacttggtccagtcaacaaattcggtattggcagacacccagtcgcttggcagatccgttatcgaggtcatgggcgaagcgggcctagtgacaggcgaatccaaagacgatccggaggatgcaagggatatgccgcggtcgaaagatgaagcgtttgtcgtttcagacgcagtaggactgctatgtgccggactagagaccgaaggaggctggggcgtaccctccgttgtcgttccggtagcagcgacctgtagacagggaggagcagttcagcaaagtcggcctcacgaacgcatgtcatcgcatacctggaaatcggcaagcgttgaacctcccagcgattcatcggtccgtcgacggtagaacagcagataagcggccgagttctagcgaacaaggagcaccgatgacgtcaataaaggctcgttccagatatccagctatgcgtacctgagctgaggatacatctgccatgttcacgctgctgtcatcgtatttgtaccagttcccatcctcgacattcttgcaaacagccgtgtaatggccaccgccgcaagaaccgtaatgttgatccaccgcgactgcgataccgaatttgattgagcctagaagaatgatatagcggcagtatgaaagacgcacagagatcataaagcaatggctttgtcgcatcttgtaatccaaatgcactcaggtctttgccgtcggcctgcagcgttttagccaggcgcatctcgtcacatcgatcgtcgagattcagaccctccacagggaaatcgacattttggtcgatctgcgtgcaaaaccgaaacaacctcagcgagtggttgagaaaacgaacacacctgaggttgaacgctcaagggcgacgcaccttgctgcggtaatacgacccggacgatccgaaacgtttgaagcagatgaccaatatatcgggggcatggtagatctccattttctttgtggcagcctgatgcttcttacactgtaaaatgccgggatcattagcagccgttttgcacaacaagcacacgggactcacgttcgaacaataccacagatcgttctctcccaaggtctcctctcgttcaaaatcgtcaaggcaatcgtctaacgtcactcctttcctagttctcgtctgcattcttcgtcgttcgacgtcaatggcaccatccacgtgagttaagaatgcttcttttgactcgtaacgacccatgcctttgggtccaaagaagtgctcgagcacggagttgtctttccactcgacagcgatgacatcgttctggaacaccagttgctgagggggcttctcctcctcgtcctcgctcgccggggaggatcctgcgaatttgtcgaaagcgtgtcgcacacgatgcatcattccagatttcggttgacgacgctcggatatgctatctcgcttgctgtgttccacatcgtgtgcgatggcaccgtctgttagcttgcgggtcccgtagaatgcaaggtcgaaagtgtttgccaggcgaggagggccagacgagctggaagctgataaccgggtgtctgagctggcacgccgcccatcagactcgctctgactgatcgtgagctcgtctaccgtctccgccacactctgggcgagtgcatcatcagcatccccgaggtcgcctttggcttgtagagcttcgtcccactcagcctccgtcggcagcgcgaccaaacctgcgtagcgctcagctacgaccctgcggatttcatgtgggtctttgctttgggcggccgtcaaggcaacaaagaatggaagcgcgcaaggggtttcgttcttctgcctccttctgtccgccgatgggaaagtatatacgggaacgatgacgagatcttgctctttcttgagcacgattcgcggcccttgatagctttggatgacttggcagggtaactggtgcataacgattgtgtcgccagcaccgtcagaaacagagtcgttgttcgaaggatacgaccagatcttttggttgtactcatccgtcgtgatgagctagaataaaggcgaacagggttaaaggatacctgtctcgaaaagaccatgctttattgctcactgtggtggggtccatcccacagatatcagcaacctttttctttacatccgcataggtgctgctgagcgtgtactgtatctcgacctaaggtacgggctatctgtcagcttgggtcacttgcgttgcggcatcgatatacgcaccctgatcctctgcgctctggagtcccatggctgaacgattatttcccgagctttcagacggttgacagggataggcacagtcaagtacatgaactagattgacgaagtgtgtgagcactccgatccagctcagcatgcttaagggagaacgcaagcttaccggatcgagagttatcgatttctgcacatcgagaggccgtcagccaccaacgcgccgcactcgttgaatcgctgatgaggcgatcgactcaccttgctacagtctggacagatcagcgtactcttcagctgtccctggaacaggtcgacaatcacgctgtcgtttcgtttcttgtagccttcccaacactccttggcgaaaagtgcgagatcttgttcgttcccgccgtctttccagtccggcttttcgatatacggcttcttctggatacgattaagatcctcgtgcagcccatcgagaaggaaagcgatcagctcttgtgtgtcttgctgtccgtacccggcgaaggatggtgcaaaacgcccaatcatctgcttgaattctcttggcgtgacagcattcgagtagcttccgtagtatcgtgatgaagtccccgacgacgattcgctccatagttgctcgatcaggcctccgaatttgtccgcgacttgtcctttcatacctagcggattcgatcgattgatctcggacttgtagaaaccgcctgcgtgttgatcgggttcagtccggtctctcctccttctcagggcactcggtatgaatctcgcacggcaactcacgttggaaatactcgctcaattccttcgtatttgacaagcactgcagcccgctgttcatgaagcatgtgttctacgacagacgaagaagctcagctcgtcgcgacctggcatttttgtagattcactactcacacctaggtttgtcaatcccttcagacctcttggttgccgcttcttttcgatcggcgcttcttgtttctttgcgccgaacgccgaagaagaagccctcgagggttcgcctgagaacatggctggttggctgaagagaggtgccggagcgacaggccgcgagagttgcggttggggtacttcttctgccatccctgcttcgttcagcttgagaggccactgcagtccagaggtcgtttcatcagcgatctcgagcgcgacgcagtctgcatcttcgatatcgatgtcagacaacatcgggtccttgccatcgatcggagacgcgtcgctactgatacatttgcccgacaaggcggaaatgagatgcgaggggagccgtctggtcgccgtccgcgtcgaaggttccgaaccgattgcgtccagggaagggtcgatttggtcttcctcaacggcttgagcctgactttgagcctgagcttgggcctgggccagttgatcagggttgacttgtacttgccaaagcctcgtgcgcagacccttggagctctcgccgttcaacttgaatatctgtcgtacggcttggtgcagctccgacacctgggtggtcgacgagaatgatttccgaaaaggttcgccgtcagaagggaggtgtgcaagtgtcgaggatgaagcgtagacgtggaacaacttgagcatgatagggttgagctcgatcttgaggtgtccatgagcatcggaaacgacgtatcgcttgacagcagcctttcgcgtggtactatcgccgtacctatgtgtcaaagtacagtcagcgtggcccgacggccgtttaacccggcgaaacgacggcggactgaccattccacaatctttacccatccgctttcctctacaaagacgacatcgccctcgggctcatccgccgcatccttgcccttcttttccgtctctcggaactcgacgaggttcggcaagagcttgtactcgttgatgctgccctcgggctgacaagtcccgtggaaggggttcccaacctctgacggtcccgcacggtcgagcaggctattcgctggcctgggcgatctcaagaggccgacttcaggagaagcacccgccccggcaccgtcgacgagcttcttaggtgccggatagtcttctgggtacgctaggtaacgaagtaagaggtaccaggatgaggggacgaggtagaacgccttgtcgggatggagagaagcgttcacggcagctatcggcgggaagacggagcgaaacatgcgatcagatgatcagcgagttgcagcacgtcaaagtcccgcgcagagcgttctcacctttgataatctcaaactgctcctgcaaggtaggcgggctggtcgatgcggtagaattcgctcccccactcgaccgttcgtcatcaatcgtcatctcgtcgttcacgtctctgcctgctggttccacgtcgaatccaggtagcgagccggacggggtatgtcgtccagcttgctcatcggcccctacaactctttcgacctctgcggcaagaggcggaaagacctctgtcatttttgtaggcacttggggattcgtagcgttctcgcccgtgggaaggctgacgacgggtgacgattctcgactgtgcaagtgttcctctgacattgtccttttgggtgaagaactatcgccgggactgccgatatctctctcttgttcaggcgtgaatgatctcggacgtttgttgttactgctcgtctggctcgtgtcgttgttctggctgtctgatggggtatacgattcgtttgacgtcaaaggtggagtctgcatcagatcattaagctccagttgacgacgaggaccggtaatggagagtccgtcggggttttaagatgcgtagagtagctaatttcaagagtgccacgagtctgtcgacggtggttttggtcgtcaacactcgggagatgttgagaaggaagaagggcagatgtggggaagacggggggaagacacagggtgcaaagctaaacaagatgcaagctaagatgcgtagaaaacgtccgcggcatgtcgacctcgatcggatgcagaagcagaagcagagtgtagcaagtagtgtagcacttgaaattgaccctgatcgatcgagaataaacgtctcgtatggagaacagaatcaaatcatcaacggtggctgcaaggtggcttacacgagcaagtcatttcataattatgtgcgatacaggtggatatcaaaaggtggtcggagcggtcgatattcgaaggactaaacgtcccgacctttgacagtctagtacggctgatcgccggtatccagcttctcatcacgactgccgccgatctggagattcttcctatccctctcgagctgcttcctcgtttcttcgcccatctggtccttcctctgcgcctcggacgcttccaactcctcgcgcaacgcttcctcctcctcggtcaacttgacggcatcttccccatcgaaagcgtcgtccggtatccgtccctgtctgtgatcaaaaatgcgatcagcatgacctcggtaacaagcgagcgtgtcatggactcactgttcggtgacaccgcccttcaggatgtacaaaaactgatcggacccgatcggacccggtccagtttgataggcaactgcgacagcagcggtccttcagattcaacctttcacaggcattccaaccagtcataatcgctcaccttgtgtattacaccgcgagcacatgatagacttcctcaattccagtcgtttgtcgtctcgtctgagtgacgagttcaagaaatcgattagcgtcaactgtggtctctgcgataacacttcaatactaaccgttttaccaaacaccgtgttccctccgttgcactgagcttgaacttcctagccgattgtaatgggagatccaggccgtccttgcatcgaatgacataagctccatccgtcctgcagacccccgcaaggcgaatcacgttaaccatctgacgaaaacatcgacgggagaccgatttctgcaagctcactttcgacgaggtagcttgtccagtccacggtcgatgaccaagaggaactctccgcacaaacaatagaaggtacggaggatagcttgtgaagacgccgtggccgtggcctggtccgaagaggagatggctgctcgtgagacgactttcggcatactgaccgggaaaaaagtgacgggagtctgttgaggtgcgaggcgcggctaaagtcagcgagaatcccggcttctatcttatcaacccgacgtactcgagattgtaggaagcttagacgcagatgaacctggagtgccgtcaagtgtcgtgaagcataggggcattattcaggtcaagaagtgtttgtcactcaggctcgggtaggaaagcagctagccttggcatattcgcgtcgagctcggtgtcgcttccgaaagtcgtgactaagaaggtactcgacacctcttgactttcgaattgatcacatcgaatcgacctcctatcagcgacaccccgcatagccactgtaccactgtgaaagagacctaatcgaccataaacgcttcgcaagtaaaaaatgtcgaacgaggagtgcgtccgtcggctcctgggtagttgctgcgtcattatgctaaacctgattttcaatctagagccaatgttaccccggtagagagtacggaggagacgcctgtgacgccagcgtcttcgaaaccgaagctcaaggcgaggctaggagaaactcagatcgtggagctatcagatgatgaggacgatgcggatcttgtcgggcgtgatgacgatgacactgctggagatgctagcgacccagactttttgaaggaatacccagacacgaccgatgtgagtaggagttcttttcggtccgtttcgcttacattgggtgacatcggtggctaaatatgtgacctgatatcgtctataggacctgcatttgcagcacttgaagatcaccagtgaacagctcacacagcttcactttcctcgcttcgggaaacacctcaatcgactatgcctccgacagaacaacctcacctcacccctgccttccgaggctttcaaagaccttgaagctttgaaggaattggacttgtatgataacagactcggatcccgtgtgcatgacgaggagattgctggctgttccaacttgacgtaagtcgaagctctcctcgctctcgaaattttgcctagactccctttgatgcccgcagtgacgtgactgatactcttgcattgataggacgcttgacctatcgttcaacaacgtgcgacacgtacctaacctacctagccagaaacatatcggcacactctacctcgttcagaacaagatcgctcaggtcgacgaaggggagctcgactgggcggccgagtcgatgaagagcctcgagcttggagggaacaggttgcgggtaagtccatatgcgattgggacttaggagaggtgctgcctagtaaactgaaactgagctggccgacatcacctgttccttcgtgacacttagaaaatcgagaacttggagaagttgacattgctggaggagctgtggttggggaagaacaagattagggcattcgaggtgagccatgcgaatcttcctccggtacagatcgggaacttactggatctgtgcgattctccgcagaatctaagcagcttcagcaatctgaagattctgtcgatccagtcgaaccgcatcaccaagatggagaacctcgagggtttggtatctctagaagagctttacttgagtcacaacgggttgagtaagattgagggtctcgagaagaacgtgagtgtctcttgtgcatgcaggccggcatgtcttcatcgtctaacttgtccgtcatgttcacgtgattgaaggagaaactgcgagtgctcgacatcggaaacaacatgatcgagaagatcgagaacatttcccatctgaaaaacttggaagaattctgggttagtctttccttggcagggtcgctgccatcgattctttcactcatcgctgctcctgtcactgttcgttctgactgcaggcgagttacaataagatcccggatctccacgacctggacagccagttggctgtactacctaatctggaaaccgtctacctagaaggcaatccctgccaactcaaagaccgcaccggttataggcgcaaggtcatcctggcgttgcccaatatccaacaggttgacgcgacgttcgtagcttcggtggctgtccgatgtcttcacatagctggcttacctctgcatacgcctctctcgacatattttcaggtacgtccggatgtaagccaagttatggccgtaaagccttaacacgaagcaagctagagacctgtatctgcgcgattgtgcattgaccggatacttcacgaatcctcttgtaaggatacaaacgctcacgaggcgatgtcgatgacgagatgacaattcacgacctacttccacacggccaataccagctgttggaaatgaccataagtccgggaattggtgtcacggcctaagtgcatgtgaccccaaacctgctgaggcatgcttattcgatgccgggactccaccagattctatcgcacaggagacagtcgagaccagcaatgagtcccccgcgacccgtgctccgcgcaccacgattcgcgaacagacgccgaaatgagcaaactagcgcgcagtattttccaacggatatcccgcggggctccagctcgaccctcctccccgcgagcaagttgagggtttcattagcttcgatcggaatgggcttcgtcggtacttttggtgagtagcgcttgcgacgaaaatggattctctggagcggtgaatatgacccttcagcaacggggtcaaccaaggtaattgtctaccgcttccttccgccaatcagacgccggtcatttaccatagccggaaaccagtttgaaccggaattggagcctgcaaggcacaagacccccagtggtcaaatatatatacaggacgtcttggagaagaatttccgtactccgactcgcaggatgatctgccagagcaaagcaaaacatcagccatgaagttcttccataccgcccttctactatcgcttgcgagcacatccattgcctaccctttcatgggtatgcccggagcacctcgccactatcaagagtggtcgaaggaccatgagaagcgtcaactgggtttcaacgccgacgcacaaaaaatcgacgtctcaggagatcacgcgttcacacctccgggcgcaggagatctccgtggtccttgtccaggcctgaatgcgctaagcaaccacaattaccttcccaaagacggtgagccgcatatttaggctgtcgtggaccgtctttgacaagcgagctgatcagtttgagggcgttatgattgtacaggatacatcagcctcgaccaggcggtgaccgcttgcaacaaggtgttcgggatggtacgtcgaattcttccagcatcatgttgctagaactaattcacaaccttgcgagtagggtatcgacctcggaaccttcctcagcgcttacgccaccgtcattttgggtaacccattggagctgaaatggtcgataggcggccagcgcagtggtctcaacctcttgggtctgctcagcgctcctcagggtctcaccgggagtcacaacaaggtacatcctgcagcgccaccgcctgatcagaagccattcgctgacatatttggctgctccagtacgaatccgacgccagtcccgggcgcttcgatgccttcttgaacggtggcaacccagcagagctttcggttcaaaacttccagaatctgtatgctttgcaatctggtgagactggcggcaactacgatcttggagttgtgattgagcactccaggaggaccatccgggagtcaagggcgaacaaccctcagcgtgagccaactacctctcacagaggagctccggtactgatcattccgaaatgttacttttgtgaaatcatcagacttctggggcaagtgtcacgatccgagcggtcaccatcgctctgctctaatactgatccaacgcctcctcaggtccttttaccggccctattgtgtcttccgccgcgttcacgtttatccccgctttcatgagcaatcacagtgctgagcgcccggaaggattcctcaaccaagatgtcctcaagaccttcttcgcagtcagcggcactcagggaaatctccagtaccagcgtggacacgagcgtattccgtgcgttttgctccgtcatagctcattgtcacccggactgactcttcccattctgtgactatgtccagtgagaattggtaccgccgacccatcggcgctgaatacacaattcctgcattcgctgttgaggctgtcgaattgcaactcgccgtgccagagcgagtcgctgtcggcggaaacacgggaactaccaactcattcaccccagtcaatctgggcgacttgactggtggagtgtacaactcgcagaatctgctgcaaggcaacaacctcgtttgcttcgggtaccaggtcttgttgaccgctgtgcccgacgtcgtcaaggggttggtcggggacgtcacctcagcgctcaacgtattgaccagcagggttgccccatcgttcgcgcagcttaattgtcctcagcttacttgtcagtcgaatcatactgttggcgtgcgcgtgatctccatactcaccagcgatcttccacaacttagtctacaacaaggacttgttcaacaagtaccctggagctggagcgggtatttgattgctcaacagcccttctcaagcatcccgatacgaccgcatccccccctattgcatatcaccttgcaggtcgccatccaaattcgcactgcgcaaaattctagttagtggcgtagcgccccttgtataccgagccaaaaaataccggaaatctgagcgtatcgcagtcgatacagcccgttactgtacagtcgacaggtgaacagtggatatataaagccattctatacaacactacgtatcggacatctcgcacgagttgccatcagacaggggtcgtgcgtcttcacatcgttctccaacgctttgagagcgctccttgtcaaaatatttggcttataccgcccgtaatcattgagatcgctcgtactaggagctacaatacaatcgagacccaaacatgtctctttcaataccggtcgtggcgtggatcgccattcacggtagccttcttagttgttgggaccgtagacccgagctcaaaggtcatctccctcttaggggcaccacacaaaaatgtgtcgaagagccgaggttcagagcgggagggggaaaaggttgctagtatggatacaaacacgatgaaggggatcacgatcatccaattccttgccatcctgggcatcccgattcacggaacccctaacccctaacccctaagaccttgcatggtgggccagttgtgagccatctcatgcgcaaccaagaagtagaggtcgtccgcctgactttccaggtcatgggggcctcgtccaatctggaccgcctcgtcccattcgatcatgaagctccactcgaaagccgagccgccgtagcctcgaggagattcccggagaaatacccggtaagtatcgctctgctggttgaaatagctcgtcatggcgggaaagagtcgagcgatctgtttggccatggcgttaggatcggcaaggaaatgggcgggaggcttggttagatagtaaaagccaaagccgggtaggctgggatccacgtaggagcggatcgacgtgccaaccatgtagatcgagttgacgagtgtgttgatcgtgcctcgataaacgacatgggcgccttcaccaaaagtccacacggccgtcgttccagcaggagcttcagagagatcccatcgtacgtcaagatcataaacggtgggacgggctgccgtagacaattcgaggacggccgggataaaaacattgccagtgccgaccagaccgccatcgttgacacgaaagtcgattcgcgggccaggtggtgtcgccacggtcgtgtgtcttgggtagacagtgaagccgaggtgaatgtgaccgatggtagaccggactgggtgccatcgacggaccatatcggcctcgacgcaagtcagctccagctcaccctcatcatcccacgagcgtatagcttcggtcccggtgtaattcatactgggcactcgtcccacgtccaagacgagttgcagcatgtcctggtccgcatgaaagtgccttccagcaatgaccatgtgggcgtcgatcgagctggcctgaagccctgcatattgaggcgtcaacccgaggtgaatcgacgttttcgtcctgctagtccaattcaggaggctgctggcgaaagtcacaacgagttctattgggaggtacatcttgagcttgacaccaaggacgttgtaggtgatctgtcgacaacatgagccccgattgggaacgccccataacactgggatctggcaatgctcggccgattatatatacttgtacgtatatctgtgacacatggtcgggtatgttggccgtttgagtccggtcatacgaactgcactatggatggtcgtggccgtcaacggtgctcaaagtagttacaatctattttgaccacgagtggcattgcagccgtcccttacgttatggcaggttctgatatgcttttgcgtccgtcgtccgcccggttcagattcgtgtctttggcaccacatggtgtcgatgatgtatagactgagcgtcaaaactcaacatgaccaatctgatcgtcgcaaccgtccgctatgtattggcatcatggaaaccacgttcggccatcatgttgagggcagctgcccggtaatcctgcgcctgattgctgagctgtagactgttcagatgcggtacggtcacgccatcattattgagtatcatgagtacgatgtttacactgcctgaaatgtggaaagccaaaacagcgtacgagaaccacagctgagttgagccgcttgaccacgcatcctgggttatatcctggggtacgagacggatccgtccctagctttcaaaatcctacaggaaatgctacgggcaacgcaagggtccgagccccaacatgccaaagtactatgtgttgtcgcagagggccaatgtcggtctcgcaagaactcatcagcggctcctagatttgtggactctatccgtcatcatggttggtcccattctcagccaatcgtgccaagtggaaggaggtaattctcttcagctcgctcgaggtgttgatcctgccctacacaaatcatcggtctatcgcctcgccccgaggctcgcaatcgagcgcagttgatccaggaacctcgttgttggtcgaagctttctgaccaagagacacgtacctatcgcttgacgcaacaatctccatgtctgtgctgctactacggacttatcccacggtacgcttgacggcagtcgttgttttcttgcaccactgctcttggtagcgtagggcccatcttcgtttatgggcggtcgattgatttcataagcaaaagatctgcttgacattctcaaccagacgtcatgaaggatcgtggccaaggtgaccgcacgggtcttatcgcaaccagctatcggtccggttgtcacgtcactgcgacatacttctgagtcgcgctcgcggaatcggccgtcttgttctcaagcgtagccccggctttggcctctgccatcaggagctcgtccaccgtagccttacatacgcagatatcgacgtcacgatcgtgcaatggctttgtaggtcgagccgcgggttcctgatatggtgggagttccaggtattcgctggcgcaacagcactatcgacaccgagtcagcggggtcgagcgcaaagtcattccgaccttgcttaccggcaatatcatgacagtctctaccagtgtcgccttgcgcaattcgcctgatttgccgcttgctattgcgcgaccctggacatcttggccccacaccgagaagaatattgtcaacttgaagcaatgcttgactcgaacgggtgtggcggtcctgcatacggaatgggaatatgcaccaagtcaaacaagacggggggacagcaatttgtgcgcccaggcgagcaaccgtgcactcaccctggacatgtcgacggtctcaacctgtcgtcattcggcaatcgcaaggtctctctgacggtaatcccggcggggtccatttttttcgctggtccaggcgcctcgtctccctgccacagcggtagatctcgatcgactttgctgaatatgaattcgtcttgctgatccggcaaacgcccgcgagcaaatagtaacgactcggttgactccggtcgaatcacgctccccgggcttcgtggcgattcgaggacgaaagactgctccaacgtcaaccgtatcgaccatacggtagccaaacgtccgggcgattcgatacgcaatgtgaaaaagacgatcccggcgacggtgagattggctgtccatgcatcccaaacgatcgtccctaacccctgtaccagcgaggctcgacgtgtcgatagcggaagggattgccggttatcggtgaccagtgggatgatccaaatctccttgcttgccgtcaatgttcctgacagccacggcaggtctgaatccaccacagtatttggtatcccggctcgcaagtcacccttgttatcgctcaatccgaaccaacttcggaatcgaggtgaggtcgcccttcccatgacggtttgtgtctctccctccaaggtcgcttgcaggcgatgagaaactcttccaaacggcgtcctgtcaaatcccgcgatggtacaaggtaccacacaggcaaactcgaagctgaccccgagatgaaccgttccagcaatcggattcagtcacagcttgctacttacatgctcacaattgcgtccgacagtccagcactattcctgctcgatcaggatcgaccagctcgagcttgttgcgataaataacatccttttccatcggtttgcctgtaaatctcggcggtacttgaggtagttgttccacgaccgacctggtctatactcactgggaagcaccagctcgacctctgtcaagagctcgacgacaagcctctttgccttgactggcctgttctgacgtacgacaacatagccagtaatcacgaggtctgccctgatatcatcgcgatcggtcgcgggctttggatgctctgtaagattcgaggtccgaacgatataaaggccttctggttgatcgtggaaatcgccgacgatctggttcgtcaccgcgggcgaatcgaacgggacccgtggggtcgacatttgtcagacgaccgtcgtcgaggtatctagacgggtttcatagaggccgtgctagaaacttggtcgagaagggtgtcaagatgaccacgtcttgatggggacagtagcgggatttcagcggaaggaagcctttgaatcgagatgctgatcgctcatgactcggtcggtagacatcctcggatttgaccggggccgactgcgccacaggccaaccccttccgcaacattcttgatcactactactgaattttctacttgtcatctcgtcgtcgatcatacgtcgattataaaggcgcccacatgggcgggtctacagtttatggatacatgacacatctcatgtcgtcatactcttcaaagcacagcgataccttccttgacgaccacctctggtagaccgcgccgccgagctgtatataatagcgacccgccacacaaagcgatcgacccgacgatccagccaaggatggcccagtacccggtttgaaagtcaccccatggtcgggctacgacgtgtccccctcgatccggcaaacacgccgcctggatcgccaatccgacggcgttgccgagctgcatgacgaccgacatgagtcctcctgctacaccgcccttttccggtggaaccgacgtaataaccgtcacgttaatcgccaggaacgcgtattggcacatgcccgatccgatgatgaaagcggggacgtagaaagaccagtaccggacgccgtcgccaccttgtccgtagatgatgaggacgagcgcgactggaaccaggctcagggtggcaaagatcagccaacgcttggcgaccagcagcttgggcttgtattggatgacaatggatgcggtcaaagcggcgagaccaagtggcaacatacgaacggccgaattgatggccgatcgaccgagagtttgctgccagtagttggggaatccaaacgcagtcgtcgtccaaaacgcaaaggggcagaggctaagtgtttgtcgaacagagactcaggtcagttcatgctcgtctgccggtcacacggatcgacttgccataagaacacgagcgccttggttcctggcgtttcccagatcgatgctggtagcatggcgttcgtatcattgcgtcccttggcctcccaaacgaagaacccgatgaagcctaggatcgagatgggtagcgaggcagcgaatctcggatcgttccatccgtactctggtccagacgtcatggccaggacgaggaggatgacggctccgaccgagagcaacagtccgaccggatccattctccacaatatctccttgaccgaaagtcctcgaacggtcctgttgcgagggacgaccaggagcgccgcaccagtcgcgacgtaggacacgatcgataacattcgaaacagccatcgccaggagacggtctcgaataggccgccgatgacgactccgagcgagaacgagacggatccgaccaagcccaggatggcgatcgctcggttcctctgtttgccctcgggaaaggttctgacggtgatattgctgttgggtccggagcagagtcaccgtaagcttgaaattcctgcgatagccgagcgccacacgcttcactcactaagaagatggaatggtcatggctgcacccatcccttggatcgctcggaggatcaagaacgcgatcgggttgctcactgacgcgatacgcggacatcagccgtcgtgcacagggcaagattacacgtgtccgtgagcccctactcacggaatgataagaccaggtttaatgtagccacggtaccgatgccgatgacaaacacccatcccgcagacgatagatcggcgagtcgtcccgcagagagctgaaacctatagccagaccgatatcgtcagtcgcgctggtacacggcaacgactcgccccatccgagactcacgcagcgaacgtgatgatgtacgcattgagactaaattcacgagcggaagctctaaatgagcgtcgtgccgtctttctcggctagtcttcaccgactcacatccacgtcgtatctggtcccgacaacgacaagtcgctggctgtatgcgtgactacgacgaacagtgccgacccgctaacgacatcgatcatcatcgccaagttgagaaccaaaagcgtcgaccattgtcgagcaaccgatgggtagacgggttgttgcgtcgaggcgacattttcgagatccttttcgttcgagtcgaccaatgtcgcgactggcaattctgccaacgacatgtccctcgattcagagagggacgtctttttcgacgacacaggggatgactccatgtcgatcgctatctcgagtctgtttgataatctgcctcaccgcgaccgagtcgctatcgccccctgcatagtcccgggcgtttgcggtcctcgtctatatatctcgatccgattttccgttttgttcaagtcaacgattcttcatccgtaagggcgccactcctccacaatccctacggcttgacctccaccgggtaccaacgtgattcgagaattaacaagtgggccgcgcgaagaggaagagcggcgggaagatattttggaaactacccggagccggccgaaacgcggagggcggagtggcttccgcgcccgcgtcgaagcgaaatgattctcacgtgaagggttgacgcgagatgccggcatgttgaacgcgtctgagggttctcggtagaatagtcgggagacctgcagcgctaccagccaccatccgcggatcatccgttccatcattgtttccggtgaaacctcgggatgttgttgtcgcggaaccgataacccctggctggctcgctcgcttgggtaggcgatgcccgaagcccgctccttgctcggtccggggtatcatccatcatcatcatcggaccctcacacttcgaagactacttaaagtatggacggcgagggagaatcattagggtgcacgttcctcttgttgtccaaagctgcctgccagtatcttcaacaaacaggaatccacgttcgatcatgagattcactgatggactctggctcaaacgtagcggcgtcgactttcgagccggcgtcgaggtcgccgaagtgttgaaccaggatgagaagaatggaatcgatttcctcgtcgcctgtaggcacattgccaaccgaggcgatagtatggatggtgcgttcgcgccatgatgacaaagttgatccaattagtacaatatcaaagaagctcggtcccgcaggtccccttctgacgttcaacgtttcgagtcccgccgacgatatcatcaaagtccgagtcgaccacttcaaggcgagtagcttgacaacgcttcggacgacctgatcacgtgctgagttggatacatcaaacacacatagggcgtacaacaaaaggctcccaattttgagctgttccccgatgacaagccgagcccgcccaacgtcaagatcgactcgacagcctcggccctgtctctcagctcgggttccctcagagccgagatcaacctcaaagagttttcttatggaatccgcttcactagtcaacaagaaggatcttccaagcccctcttcctctgcgccaccgagccgaaatcgaccgccgtcatcgacgtcccggccgagtacaccctgaaccaaatgtctgaatcgtcctgcttggagaccggtaacgatgcgctcatcggagcgcccaacatcggcgtcgatcgacagggaaagatccggttcatgctcaatgaactgagtttgaccgtcggcgagaccatttacggactgggcgagcgcttcaccccgctagtcaagaacggaggtagtcactcgatttggaatcagggtaaacggtgcctcgcacgctctcgtccgcgttatcccggctgacctcgattcgatcgagcagatggaggtacctcgtcgcagcaggcctacaaaaacattcccttctacctgtcctctcgaggatacggagttttcgtcaaccacactgaagaagtagaattcgaggtcggcgccgaaaagtgtagcaaagtcggaatgagcgttcgcggcgagggtctcgaatactacattatcaacggagggggaagtctcaagaagacgctcgaacgttactgtctcttgaccggcaaaccagcgtaagttccatgtacaagtcctttcaagccggacgcccgttgacttccgccggtcgcagcctcccaccatcatggactttcggtctctatatgtctacctcgttcaccacatcctacgacgaaaagaccgtgtctggcttcctcgatggcatgaaacaacgcgagtgttatactcgggtcttgcatctcgattgctagtgagttcggacgcacatacccatcgtggaagtacctgaatctcaagacggatcgttttgcagctggatgaaggcgtacgattggtgctcattcaagtttgacgacaaggctttccccgatccggagagctatctcaagaccgtcaaagacaaatacaacgtcaaggtctgcgtctggatcaacccttacatctgtaggtcctggtggatgcctcccatattatcacgcacgctgacttgctcgacttgtagctcaacgcgcccacctcttcaaggaaggcgtcgagaagggctactttatcaagcgcgccaatggggatgtctggcagtgagttagcctgcacaagcgctcctgcgctgatcgattgacacgacggcttccgctcagatgggacttgtggcagcccggtatggcctatgtcgacttcaccaacccagacgcatgcaagtggtacgccaagcaactcgagaacctgatggatattggcgtcgattctttcaaggtaagacttggtggactcgaaccgcatgcgacatcttgtgctgatccggcttgacgttagaccgactttggtgagcgagttccgcataagggagaggtgaccttcttcgacggaagcgatcctcggtgagctttcgccggtacgtacaggtcagacaatatgagactgatactattgtcgttgtgattttaagcaagatgcacaagtaagggcaagagatggcttcagctctcatacgcttagctcatcccgtttgccctccagttactacgcccaaatctacaacgacctcgtcttcacgaccttgaagaaccgactcggcgagcacggcgcagcggtttttgctcgatccgctaccgccggaggtcaacgattccccgtccacgtaagtcgagccaagcactttgcctgacgagctaaagtatgctaaccaggtcttgcagtggggaggagactgcgagtcgacatacgaagctatggcagaatccctccgaggaggtctcagcttgacgagttccggattcgctttctggtcgcacgatatcggtggcttcgaggtgagtggcgaacccaccgtcggttgccaagcacaagactgactaaccactcataccgcagggcttacctccggctgctgtgttcaagcgatgggtcgccttcggtctgttctcgtcgcacgtgagtttccaattgcgtaacccgtttcagtggtacatgcttaacgttctcgccactcggccagtcacgccttcacgggtccaagtcattccgcgtgccttggttgtacgacgacgatggcaaagatgaggcttccaaggtgctggccaagatggtcaaggccaaactcagattgatgccgtacttgttcgcccaggtgggtttcacaagacgtgaggatgagggaatatcatcgctaaccctgaccccgcttcgactcttaggccatcaaatcgcacgagactggtgtcccgatgatgcgatcgatggtgattgactatccggaggaccccacgtgccagtatctggacaaacagtagtacgcagaatcgcaagagtctagctcgaccggcgacgtggcgctgacctcgagatggctaccgcagcatgcttggagacaacatcttggtcgcccctgtattctccgatgataccgccaacttctacctgccagaaggcaaatggacatggtgagttgacaaatcgatcagttcgaatttccatgctaacgttctctccactgcagcttctggaccaatacagtcacctcgggtccccgctggatcaaaaaggaaaactaccccttcaccgcgatccccgtgttcgtcaaggagaacagcgtcttgttgttgggtcccgactcggtcgatgtacccgactacgaatacgcgaaagtcggcttggaggtccgagcttaccaggtggccagcgacgtcgaagtgatcgtccaggtgccttcgggtcaaggatctgactgggctggtaaagttgtcgtcaaggggggcaaggccaacggccatggcgtcaagatcgactcggtggcggacatgcaggaaaaggagggactgtaaagcagaaagtaaatacagaacgaaaggcgacctaggtatatgattgtatttcgaggcatgcaggttctagacaaacccagcaagtttcatcccaaacaatacgctcgcaatgaaagtccatccttccgctttagctgctccgtcgacgcctaacctgaccaaagctggaccgggacagacgccaccgagtccccatccgagtccgaagatgatcgatccgatgatgagcttggcgtcaatattgtacgctgcctggccgagtgggatctgccatcgagaacgaccgggggcagcggtatttgcgggagcacgaccgtccgaagactcgacgtagagctctggctcaatggacttgtccaccctgggtttgaccctcatcaaccagtgacgcatattgggtaggacggcggcgatgatgaccatcgcaaggctagggtcccactgagaccagcctcgaggacccgctccaacggtggtatccagagccgataaaaagggcagtctcatgaacccaagggtcttcaacggcgaaaccatcccgctcatcaagagacccgttccaaaggtcaagccggacacgaatgacagcgcgatttctgcgactcgtggaccgtaaatcttcttgacccgatgcaggaccttgctgagaaccaaggcgtagaacagtcgaaaggcgatggggatgaggaggacgggggcgaacgaccctttagcctcaggccaggcgatatcaatcgcgttactgataggtaagcccgctttgagttctggatgagggaatgcgttggagatcaaggtcgccgacatgaaaaaggtgacgctggcgacgatcgatcggggggatagtcgagacatgccacagagaaagtgtccgctagttcgacgtggaatctttcagctgtggtggtcggaacttgggaagagattgccaggctcaccttgtgcaacctgaccccaactatggcagcggagttgcgagatggttcatcagctagagtcgtactgacaacaagggctgtatcactcactctgctgccgaatcctacgaggacacctgcgaggacccgcctcgccactgttccgccggtaagaccgtctgccagtccatattgatgcaggccccaaccgatttgggcgatgggtatggtcgttaatgtcccgactagagcactggtgaccagcccagatatgaaggtccacctccaggtatcatgatcaccgagtacgctcccgctcagaatacccgaaatccccagtggccgtccagtgagttcgagatgctgcgaggtggcgagatgtaggaggtccgcaccgaggagtgagtggatgggagtgaacatgtcgcccgaattatgatggcgggaatatgagatactgcgaccgcgggtatgatcttgctatgaatatatggatatgagctagagcactcccgtgaactactagttagtgaatcaaggcatcgagcagttctcctcaatggtctatatagcggtcagacatgtcgtcgttaaccgaatcgacgagcattccgagttttgaaaagaggcggtggttgcttggtcatatcaatcacggattcggaaatcgattctatctaacgagcgagcgagctaggcgatcgtgacatcgggatctttccgggtagatacggcttgcaacttgcaacctccaacttaaaacacaggggtgatcaagtctgatcagtgatatgagtgtctagttttatattcgtggacgtggaggttcagccccgagcagacgatctgaaccgttctacggggtttaagcagatcccatacgcccagacaaagtgaggacatatcatcgatctgcgcggaaggatcacgacattggccaaaagcttgccaacgtatccacatcggcgaaaggcagcctgcaaacaagtggcattgaaactcggcttgggtccgattttaaagtacggtgaacaggactcacagtgtctgaatcagatcctcgttcgacatcatctcggtggtaaaacccgacaagctcggtgtgatagttccccagccttgtaacggctgcccgctacgcccggactcgcttccaaacacaggattgtccaaagttgacggcggtgataagagctcgatgatgatcagacaccgctttgccaacgcatcgtgaggctgcaagttcagcgtcgcgatcgctttgcccacatcttcacgccacttgggacttgattctgctcgaggatccgtatgcagtgcgatcaaaggcacgaaactggcgtgaaacaggaaatgcctttgcatttataccacgtcagataccaacgtcagcccgagagggcaaccttttcaactcacagaccgtaccaccactcgagggacgacgcggggcgctcgctaaagtagtcgtaaatcgaccagatcgaatcgctcgccgacctcaagcatgtctgtgcacagatccgctcctccaaatccgccggcagactttcgtcttgacctgtcacgacgggatccagggactgattcttgagggcccgttccaggaacggtcttcgattgaagatgatcctgagattactgtaccgccaataaagctttctgaccgcgaacgttagccatggataccggtctattgagtaggctccttcttggaaccacgccggtagaccgacgcgccatcgctcgagcaccgaatcgatctcgatgatttcctttgcgcaaggtggtggtgacgcaatgactttggtataggcctggttgccgatcaaatgcaaagtgctctgcagtcgaagcgaactatacgttgttggctcctcgaccgctggaggtactgacgtcgaactcggggtcagggtctgcaaggtaggcaaatgtcagccagcgtcgagaatgctttgcccgttggggacaacgaaacttgctcgatcatgtatgttgagaactaggtgtacgtcggcttcatttgcgggaagcaaaataggtcgaccgaatgtgatacaggctcccgaatcaaagacgtagaggacccaccaaactcggcgtctaatcagatagagtgaatctcatcagacttgtgtcatcgtgatgggacgtcgttgactcgcctgacctccctctcgaatggggatatctcccaaagaggtagctctcgatgcagtcctagacctacggccattcgcacggcaataccgaggtacacggatccagcgttgggcttgttccgcttttgggctaggttgcttagcaacgtgaacgcctggaccagagtcaggttgccacactcgagcgtctctactcccagctgggatacggccttttccataaaatggtcgacgatgtgggtcatatcgggagcgtggcagaaagcgccaattgccaggacaacgtttaccaatatcgtccagctaaggaaggagaataaagaaatgatagtattcagctcctttgtgaagaggcgagatgacgtgacacttactccctcgttgccggtcggggcacgatttcattccattgggcgcggaaggttgcctcgtgtactacagggtactgcgcttgatacagtacaaagtagtagtccacaaacgttgcactttcgtcataggtcggggaatagtcggtcgcaagtgttggttgatctgctgtgcgacccataccaaggccgaagctgggcagcatccgtcctccagtacaaatttgtagtatccgaaggagcgacgctcccgacgcgaagcctgaatacatcatcgaagacagtcagttcaatgacgtctcgatcttggactatggtacctcacccaggtaaccttcgccgtccggttcgatggacaacgaggccgtgccgtccgctccagcctgcgagactctttgccgctcgttccattcgtagccccttgccgttttcggttgggactctggcagtaccgagcggctttgcgaattcgagctcattgtcatctgttgatgagctagacctaatcgtcgacttgagctggtcccagcggtgtttgttggcggtcgaactcgatcgaagctgtcgatcgcttgcgataacacggacggagtagcctgcgaggtggctatcgagccggacgaaggcatactcaatccagtcatgagtaagttgtccggcggcgtgaagacggggtccatcggcagggagaattgatacggccccgagtcgtctaccggaccggcgatcacctcgtctgcttgcccgatcgcgtcccctgaacccggtccttgcgcagcaacaattgccctcagccgctcgacctcatgctccatggcgtccatgcggctgcccaggtgcactcgatatccatcagcgggtgctcccgcgagcgggcggtccttgacttacgaccgagtcagaggcgtcttgacggacagcgtgtagtcgcatgatcggccatgtttgacacaatcactgcacggctccgatcgatcacactgtcgagcgcaatgaggtagctgtcaggttggcagctcaatcacatatcgatgaaagcctacctttcgtttcagtttcttgcacgctgcacactatcagaacaaaagtagcggaagaaagaatccgtcaacaaggcgggccccgaccgaattctaactcgcgggacctcaccgcctgtgtccggcttgacgtcgagcttgaccgcctcctcgatctcgtatcatcagagcctgttcttgaggggggcatagttatgacaagctatcacaattgtatctcaacgatcgatgtgagtctcaagcgacctcgccaaatgaaagagagcagattcattggctgattacctcgagcctttgcccaagctcgacggacgagagggaaccgttctcgtcggaaagcgaatccgtccaaacactagcgcgcgaattctagcaaccagcctcaaatgacgttctgacttcggtcaagtattacatgtcggtccgatttgttgtgcttgtattggccttgcagactgcataggctacatcgtgcctaatcacaccaagcgagaaccagatttgaccagaatcaaatctataaacctacaaaacgctgacaagatcacgatggagaccgccataacccaacttgccgattatatcctggcacaggctgccaggttcgaatttgaaacgctacccgcgctggaagcataacgagctgacgagttgctgatatattgacagcatggagtccggtcaggctcgatttttggtcggtacgtcgtatgcgaaattgagccttttcattcattgttactgattcgttacaaaggtgtgaccgggtatcctggaagcgggaagtcgagtctggcctaccccctgactgcgagaatcaatgagaaagcaggaggatacctcgagggggaggtggcagtctgcgtcggaatggatggctggcattactcccagatgcaactcgagaagatggaggtacgtcgatggagaaaagccatcgtgaccaatgacactgagtcgatttcaattttatcaggatcctgaaaacatgttccgacggcgcggagcgcatttcaccttcgacggacacgctttctcgcaattcgtttcgtctctgaaggacacgacctgcgttacgcctagggtgtttccgtcattttcgcacaatctaaaagacccagtcgcagacggcggattggtcttgccctgtcataagattgtgtgagcattctgcggttggcggccgctgcgattgcattgctgatttgcggggagcagcattctcgaagggctttactgctctctaaacgtgccgccatggcgggatgtggccgagagcctagatgaacgcatctggctcgacattccgaggttcgcagatcagctcgacgggtcagactttttcgcttactcccgattgcaagcagacagctagcaaaggagagactcgtcaagcggcatttgcaagatggtgtcgaagcgactttagaagcggcatgtcaacgcggtgagtgattagcagcggagattgtgatccatcaacaaagctgaaccggtcgtgcccgaccgcagctgaggaatctgatttgtgagtttcggaagccagtcgtcaaattgtgatcatccattgatcttccgccgcgctcttgctggctttcagattgaacggcgacttcatcgtggccaacatgcttcctccgactatcacagtggggcaggcggctgagacccaggacggagaatctttccgctctacctatgcaaggccggaccagagtgtagcttctgcatcggtccggacatgaaaaagatgatgaatgtgcaatttggatgttcccccagccgatcggcgttcaccatcgcgtgcctgaatcgatttgtagcgcggccattgccgcgcagcgttttctgcttgagccgacgcgcttggaccgtagcctggcccagctgaccccacaatctgcaacgccacatatcgtgtgagtgcggcaaagggccaccactcggctagaagcaggatcccccgatgattcttctacggtcgaccgtttccgctctcgatttccgtgtgtacctgtgcgcaaatcgaccgatatgcttatataggtgagcgacaagtaggggaatttctggggctccccggaccttgccttgaaccataaaccccacacccaaacgcgaatcattatgtccccatcgccttatcacgccgacgaccaaaagttggatcagactatgatcgaagatggtcgtggtcgcaactatacagagtacagcgcagacgataagcccaatcacgatctcgtcgagcgcagggaaggaagcgataccgatgtcgacttcaactttgtcggatacgagcggccacctgcccttggcctcaagcagctcttttccaatgggaaactgtaagtacagtcattgtaaatggcacctagtattccagcattcttactgagagacactcgaacagatttgcaatcacattgatggctacgcttggtggattcgtgagccgattcacagtgttcccggctacacagaccagttgacagagcttgtgctgcaacagctcttcggttatgatcaaggagtcgtcggcaacgttttggtcctggaaaatttcggtgctagctttccgcgaatttttatggacgaaggattgaaggtgagcccagaccgacgtgtcatatcgtcaatagcactgttctgaccgcctggattacttcagggctggttcgtctcttcactcttgctgggtgagtatcgcccgagtcgagattgctcaatctctctctgaccacggatactattgtcaggtgcatggttcggatctctcatcaacggacctttctgcgacaaatttgggaggaaacgatgcacccaattccatgtcatcatctttttgctcggaagcggattgcagacaggagctacttcggaaggtcagtcgggatacgacttcgtagatgcgagctgcactaaagcttttcaaaatgatgcactccaggccatctctttggtggacgagtcgtggcgggtatctcggtcggtgccctgactcacatcgttccgatgtacatcgccgagatcgctcctgcctcgattcgaggatccctcgtagcactgcagcagctagctatcacattaggggtgagtcagcaggcacgcttcatcaaagctgagacacttatcaatcccctttcgaatttacagatcctgttcagctgtacgttcgcgctgcaagcttctcatgtggcttctgattctgaattgcctactgtgcagactggatcgcctatggcacctcgcatatcggaggaactcgctgcgcacccgatatcccttacactggacggcttctcaatggtcagcgcggtctctatgttcccgagactaggcacactttgacaattgacaatatcaatgtacccacaggcaaaccgaccttcaatgcctacactgacgtcggtcccaccggctgcaccggtcaaaccgaggctgcctggagggttcctgtcgggatccagattttccccgctctgcttctcggtgtaggtctcttcttcatgccattctcgcctcgatggttggtcgaagtcggtcgcgatgaggaagcgcagcaagtcctatccatgttgcgaggcggacctgccgactctcctttcgtcaaattggaatacctcgagatcaaggccgaggtcgagattgtcaagcagatccgagcagcgaaagcggccaacaagaccagtaccttggccaagttgacgcaaccgtacgcagaattggtatcaacaaaggccaattttcatcgtctggccattggatgtctagtcatgttttaccaacagtttattgggtgtaatgtaagtgccgttgcgtcgagagcgtgctacatccgttccatctgactttgcgatctctctaggccattatctattatgcacccactagtaagtatatgactcgtcgcagtagtataccgcatggtccgggccctaaggaccactccgttaaaccctgatcagtctttgcgcaactcggtctcgatcccaacacgacttccttgctcgctaccggcgtatacggtatcactaacaccgtatttaccattcgtgagcgcgagacgtggaaaccacatcatcgagatgccttcattgacggatctgcgacgcttctacagccgctgtcatcttcctcgacaaggttggacgtcgtccgcttctcatggcaggagctattggttgtggaatctcgttgatcatggtaggatccctcattgccgcctacggagatgattggccagctcatcaaactgcagggcgagtcgctatcggtgagttataaatgcgactgttgcacagtttctacgctaatctagtcgacaactcagccttcgtctacatttacgacgtcaacttctcttactcctgggcgcctatcggctgggtcttgcctagtgagattttcaacctgagcactcgatcgactgccgtctcgatcaccacatcgaccacttggatgtgcaatttgtgagccctattatatgtccaatctgtgatcggtctggactgactttcagcatcaatcacctagcatcatcggagtcgtttcgcctcttatgctggaaaatctcgctcacggtggaacttactatttctttgcggcatttgccgtgctcggtttttttacgacctgtgagcccggcgtgggaagagtagagctcgactcggactctgatgcgcatccattccgcatgaacagtcttcttcctgcccgagacgcgactgaaggtatgtcactttttgaccagtcggccagtctgagtatgactaaagcttttcgctacgacagactttggaagagatggacgaagtcttcggcgccgttatcgacgagatcgatcaggatatcacctacagggtgaacgttgggctgggcttggtagcgcctggtcacggcgttcgagctcacgtttgaggaggtcgggaagattgagcgatgtgtaagagcgcagactcgcctgtttgtggtatgatctcgtgttcagtaggactagcaaagctggcagacagcgtgaacagaattttcaagtctcgtaacgcgctgggctcctgtctcacgtcgatcaagcaagacgactcaggcgacggctcggggtaaagtcctttgctgctgagcagtccgcgctgttcaccgctcagattcatcatccgggacgagcgctggcacgacaaggagcgaggccgatcgccaatgcttggagtggtttcgaaggctcaaacgctttcgcggaacttgagtcaggaagcagacgagtttgtgacacaacggaagtatctcgtcgaaacataggctgggtgggctagatttggtaaatacacgtggaatggaggagcgagtttggattggcttccacgggtcctgtgctcataggtggcaaaacgccctgtcctggcatggacttggctgctgcagtatagaagaagtagcccccgcattgtctctcgcttgccatcattaagtattttgcttggtatcgacaacagtcatgccatatcgaacttaatgcaacatacatagctcagatcctttgctcgcgaaaaaatacaactatcacatcctagaacacggtcccgtcactgatgatatcgatcggcggtcctcctgactgcctggactctttggcaacctgcctgcctgccttccacgtcgctgcctccaagatttgcgccgtcgacaaatctggcgcgcccagctttttcttgatggcttcggcaatcttgtcgagcgcgatgacggtgattgctcgccattgcacgacgatctgcgaatcgaccgtaacgcggggtacccgattctccgtcgggttggattgaggcatgtcgagcgtcttcgggccagttccccagcccccacccttgtcataattcagctcgaggaagcccaagtctatcaaaaggccacctgcagcagggcggtcggcgaatgttagcggcatttctacatcgggttattctttgccgcgcgtaccatttctgtattctggcagacctgtagatcaaagtcgggggttcgttcagccgctggtcgtcagagagaaacgacatgaatgactcgcctgtcattcgctcgacaccgttgatcttgcattccagaaccttttgaagcggttccatgagcgagtacgtcaaccattgagagagtttgtggaaagggacgctgcggtacgacgaggtacaaaggggtattagttcagcgacgtgttgcaaagcgacggactcgaactcgcattccagcggcttcgccctcctcgtcctgggctagtcgattgcacttccaagcatccccgagagagaccccctcgagcgtcgtcctagcctcgggccaaatcggtcccaagccgtccatgacgacatcccagatcctgtccacctcgatcgtgggtgtagactcgacggttccctcagggcagaggtaatccaccatgttccccggcctgatcgatccgtcctcgcccttgaagatgtcaggtctggcttccagcgcttctcccagtcggatcaacaactcggctcgcccttggagtcccgtgacaaagccgaccttgccatgctgcaaccccttggcgacgtcatcaacggtcaatcgtttcaaggctgtcgaatcgaccttgggcgcgtccaacctgccgtcgatgccggaatcggcgatgtcactattgaagatgccctgcaagaacatgtccaggctggccaaggcgagtccttcggagcgttgagcgtattcgccggtcgaggccgagtagtatttccacgtcggaccagcgccggctacagatgacaaacgtcacgtcgagacatctgtcaacgtgtgtctcgctcagagatgtttacttgaacttaccatcgagcaacacgctgacgacaaacagatcgatcaacctcttggcgacttccctcttttcgatccctgcctcttgccaactctgcacgacgggtcccaactgatcgcctcgtttcggggtgacgaaatgcctccaccttgaatggggtgggatgctcgcatagtcttgcccatagtctctcttgatgacgtctatgcaataatcgacgacttcgtcgagcttgtcttcatggaggacgagccagtcgagttgtttctcctgggcgagcttgtagacgagctgtgagcgttgtcgaacagcagcgagggaacggaggtaggtcggagtgagagttggctgttgttgcgtcattcttgtgtgcggtcgagatgaggatcgagataggaggagcaagggtggttccgggtgtagggcagggtcgtggtaggttgatatacctcgcggcaagttgcaacgttgtcggttgaagaagcaatcaccccgatgttatgatcaaaggaagatgaatggcgtgatgacgatgatgatgatgatccccttttgatctcatcagactccttcaaaggactcttagccctcctttcctctccgttcctttcggcactcggcgatcgccgtgagaagcgtttgatcgccgtcgtcgtggtcgtcgtcaacaaagggggttatcgctggacaagtcggaagcagagcaaagattgaccacgactaacccgactcgcccgtctctcccttcgcaagcccgtggttgactctgagccacgtcatcacgttatctcgcccgtgatcagctgatcacctcgcctcgacctccccaaccgaggggattctcggggaaatccgatgaaacgtgcgataaaggcgaggcaacaacacctactctgggagatggatgacgatcaacggggtcatcgggcgagtcgggtcagatggacgacaagcgtatcaatccatccgcacggctgacgacgacgaccaggacgacgatggtggcgacacggcggcagcggccactggatcggagtagagtacacgcaatcttgtgatggtcggagaagctcgagctaatcgtccatctcaagggcaacagagcttccccgatcgatatatataatcccggtggtcatcatcaatctacccatcgttaacccatcgacatcactcccgaatcttatcgacgtatatcgtacacaagctccacaacctatcgcccatcatcaaccatccgacctggtccgacatgtcgtctctcagatcaaaccacacacacacttcgatgatgaccaccgagcctatcgtcttgccacctacaaccgcactcgctgacggacccgtccgagtactggacctcaaggcctcggtacatcacgtcgaggatctatatcctgaccctcccgtcttgactagtgagtcagtcgtcctgaccccaaacaacggcccgcatcctgatgtccaaatttcgttccctttcgaaccgttctttcaggctactatgcatctcctgaccgatcactcctcgaccccattcctctccaatggggagctcccacggccgcatcccgaggccccatcgtggtcagccatcgccccaactcgatcgcgcaccgcaatgccatcggcgcgcactcgggttcatactcgatctaccgagccttggccatggccctgaacaccctcgacccggcccatgttcccgattataccaataccgagccaccattccctatcaacccgaaccccagctggtttgacgacaagaagattgtcagcctggaccctttcggtcacttggcgcagaccgagtttgcctctttcaacgcgcgcgggttggacgtccgtccgacgatctcgctcaccaaggctcatataaaaatgtccgagctcgatcacgcgtacaacaacgggtcgatcaagccggatggcaagattgtacacaattctctgccccgtgaggctttcccgggccaagacgctggcgtcgaagtggctgtgcacaaggcggccgtagagcccgtgtggcacttgcccggcttggctcatcgattcaagatcagcgaggacctcttgcgtcgagcgttgttcgagggtgagtcccccgatatctctcggtatcgaattccgaccgtgactgacacgtttgatctgatcttgctgcgtagaaacgggagggatgtaccccgagttgatcacccgacccgacctcaaagtcttccttccccccatcggcggcctgaccgtgtacatcttcgggaaccccgcacacctttcggacccgagcaaagagctcaccttgcgggtccacgacgaatgcaacggctccgacgtgttcggtagcgatatctgtacttgtcgtccttatctgatctacgggatcgaggagtcgatcaagtgcgcgcagaggggtggggtggggttggtcgtctatttccgaaaagaagggagggctctgggcgaggtcaccaaatgtgggtttcctcggattgatttgtgttcagtgaaccctcggttggttgctcactacgagtttttttccgctcgatagacctggtttacaactcgaggaaacggggcggagacaccgcggatcgatacttcaaggcgaccgagttgatcgctggggtcaaggatatgcgattccaagcgttgatgccggacgttttgcactggttgggcgttcaaaagatcgacaacatgatctccatggtgagtgcgaggtgtcgaagttcagcgaggcacgcttggagtgactgacaattgacgcgaatgttcgggctacgcacacagtccgacatgaagcacgacgcgatcgtcgactctggcattcctattcacaaacgatacgatattcctgccgagctattgcctcccgattctcaagtcgagattgatgccaagatcgccgccggatacttctctgcaaacaagcaggtccgaatggaggacctccatatgactgtcgggagggcttgggaagatctcgagcattagtggatgcgggcgcgcgcgtgttgtcctctttctttcgcctccccatttacgactccatcggcgtccatgaccgaccgacgctgacgacgacatagactctccatcggctgatctatccacctagcccgaattctgcgtatgatcccgttgtatcaccagacaaaaacacatgaactgttgtatccttgagaatgttccttgctttaccatcttgatcaatcgtgatgatgacacaaggtcgatgagtgaccatgaccacgatgtagcgatgacaaacctcggtcgagatgcgacggaagtaaattcagggtaaaattgcgtaatcaccgaggtagtcccgtcaaggggtggaggagggatcagagcggaagcaaattgattgatggatcatcatcggtcatcacgcgacggaagtggatcaactgatgggtgatgggtatataaccagggaccaccaacgacaacttgaactacattcgagaccaacacttcccctccattcatcctcgtcacactctactcacttttcctcacttcatacacctctccaccgagacactacaaccacaacaacaatcatggtcgcttctcccgattccagcgccacttcgatcaccatctttggagccaccggcatccaaggtggtagcgtgctccgacacttgctccagagcgacaaggcctaccgtatccgtgccgtcactcgtgacccgaccaagcccgccgctcagaaactctctgagcagggagttgaagtcgtcaaggccgagcttggggatgctcaagaagtcgccaaggccgtcgcgggtcaagaattcgtctttgtgagtctgaacatcttctgactgctttgttcacgcgctgatcagtgttacggctactcgtgttacaggccgtcaccaacttctgggaacacggtcgtcaaaaggagctcgatgatggcaagcgcctgatggacgccgtcaagtcggccggcaacaagaagctcttctggtccgggcttgaacccgtcaagaaggtcagcaatggcaagtacaccaaggtcgagcactttgacaccaaggtcagtccagggccccacattaaggaccgtctcccttctgatcgcgtgatgctcttgcacaataggccgagatcttggattatggcaaggagcagggcgtccccgtcgttgacgttcagcccgcttgttatatggagaactttgtcaccatgctcactccccgcaaggtcagcccgtctcagaccgcacctcacctcggttcctgcgattagctgaccatgtcgttcccatctcccactcgatagcaagatgatggctcgttcgtgttcgctctccccgtcaacccgaaatccaagatctccctgatcgactgtgggtctgattacggtgcctacgtccgaggagccatcgaatccgatgtcgaggtcggcggagaggtcttggcttcccgtgaggaagttgacccgaccaccatggccgaagtctggagtcaaggttagtgtcctctgaaattagctgtgccctgtttagccactgacggatcgccgcctgtagtcaccggacagaaagcggtctactaccccatggaggccgaccagttcaaggccgtcgccggagaggagctcaccgaaatgatgtgctggttctccgactttggctgtaagtcccggactcgtcgcacccgtgcacgtcatcgagcccggctgaacccgaggttctctttcacgtccatacgacagactacggcggaaaggatatcgctccttcccagaaggtcttgcccgagggtgtcaagaccaacacctggaagtctttcgtcgaggctcaagattggtccaaggtcatcggatagaatgatgaatcgatccgacgggcgagccgcaagtttgcgagtgaatagggacatcgattggtcaagtggtttgtcgcagagtgtgtcaaaaattgattagtcgaccgaatgaatgtttataccatggctgcagatagactatgcgagccggctagtctttcgctatgcgggtgctttgacggcacagacgagatcctgtgttgcactgattcgcactcggggtggaatgggctgtccagtcattcattcccttatgtcggtcaagatctttgtccaaagattcgacaagttgctgttcgtgcggttgacggcccaggtgcttcctgttgtgatggagagactatctaaacagggcaacagctcgcgtccgaaacgtcacctcaaaaaataggtaggcatcagtcatagaccggttggagcttagagagtgaaactggaatcatcgcggcgccatggacgctagccaaactagctaatcactatcgttggtgcggaccatgactctacaacacgatgctcgaaatcacgagaacatgcgattaataatctggcatcggaacagtcaacacttaggagatatctagattgaactcgaaaaggtatatggtaagagaccgcacttcgcaattctacaagtgggacgttcaagcctttttggcggagacgtcgctaggcgtcccgttatctgggttggccttcttcgccttggccttcttgggctagcgaaggcaagcaggggtgagagacaggccgagactagacggtgagcgcaaaccgaactcaccacacgtgcgaggtagtagatggccatggcgccgaacacattgaagatgcagtatgcgatcaagatgccaaagtttcgccaagcgtgtgagtatctggacaagaggattacgtcagtacacttgatcgaccaaaatgtcgccttgtagctcaactcacgacatgccaaaggcgcccaaaaagtcgtccgtgctgttaagctgacagtatgcacagttggcggtcgcagcagggtcgcgcaggtatcctccggcagcgctgatatagctgctcatgtacgcttcacaggactgtcccccagcagggtcgaagatcaggaactctcgttccgcacattggacgctgaacagaacggcgaatcgatggtaagcgtcaagtcgccatagtgaagaaaccaacgcgcggtacatacttcgtgccggagataccagtcgtcaacatgccctccaccaaccaggtgaagggagagacataatacatccactgcgtttacggacgggctcggtcagtttaaaacgcgctagacgttacctcgctcgactcacgatccaccaaccgaggtccggcttttgaaccaagacaccacagaagatcaactgtcaagaggaccatggttaatggcatgtcggtcaccctgtagagcgcagagtagacgcaccgagagcgagaagatcaagttgccgatgtttcctgcagtctcggcggtcgggataccggcaatgaccatttgagcgaatgtcgaagtgaaccacaagaacgcttcaactagcaggaacatgagtgctccacgctcagcgacggcatcggtgggttgagcgttgcggtatagaccgatgctacgaaaagaaggcccagagattagtgtcggggcaacgtctaccaggatctcgagaagggctcacgggtaataccagcagaagaataggacggcaccggcaatcgtgttccaaggcaattcgaccaggatgttggcaagcatgaagatctgtgcaggcaaactcaggatcagcaggttgaagtgccgagtggctgcgggcgtcgacccaccttccaagaatacgttttcgaaggcctttctcggatttcgtatagagatcgctgagtgacaaagtggggcatgatttgctgacacaattgtccaaagacggtcaagcctgaatagcgttcgaaaggaaagtgagacgtcagagtcaagcttcggaaccattgtgtttgaagtccgactgactgtaggtataatggacaacgcgggatcggagagaaaggtgagatagatacgatcagcaaaaacaaagtatgcggtcgagacgacccgttacgcacagcaagaagatctgtacggggattcattaggtcagcaagctcgatgcacaaaattgtccggcttatcacacttactccgaacaactggttttgcatgccctgtgcactattgtccgccttgaacagactgaatccgatgaaaagcccaacgatcgagacgagagcaatcttggagtagatgtaggtgggcgacctccagatctgttggaaaactcgcttggtgacaatggagaactgttgggcgagcggggctgcgaattctttgtaggcagctggatccttgtccttgtcgccagcttcttttggtcggtcggatcgcaggcgagcgagttcttcacgcacggctgcgcgctcaggactttcgagccattcggtatgccaattaatgtcgctgtgcgatccgggagcggcaccgatcgcatgcaggatgtactcggcagggttctcgcccttttgatacttgggtcctccgtggcgctcaaaatagtcgatgagcttgcccgaattcttgccgacttcgtcaaagtagacggtctttccaccctttgcgaggaaaagtaatcgatcgaaacgctcaaacagcatggcggaaggctgtacgtgccaagtcatagtcgtcatcagcaaagcaaacagagaaacaagcgaagaaatgaccgcggactcgcctgatggatggtacacaagatagcttgtccgtggttggccaacctttcgaggaggtccagaatgttccaagaggtttgcgaatcgagaccggacgtgggctcgtcaaggaaaagaagcaattgaggtttggcgacgagttcgactccgatggtgagtcgctttcgctgttcgacgttaagacctgtggagaagcggggtgatcagtcacagctggtggtggacagcatctcatactgttgagacgcaccttcacccagatctcccacaacggcatgctggtaagcctccatctccaaaagcttgagtacttcgtcgacgtatgcgagcttgtcagctttgggaatgtgtcggggctgtcgtagcagggcagagaattcgagggcctctcggactgaggaagtggccaaatgcacatcctgtgggagccggcgtaaattagcatctcgaacgatgaacaggccatcgtaggcatttacctgttgcatacaatatcccgtcttgcgctggaaactatcatcgcgctcctctccatcgaccaagatgtcgccgctgacgactcccatcgtgacacgggtggcaagcacatcgagtagggtagttttacctaaggttgggattcgccattcaatcagatgtccatcgttagcatgcagaatgctatgagcccgctggaacgaggagttaaggatctactcaccagcacccgaaacaccctatacgcgtgacacggcggtgatcagacactactacgttgcctcttttgctagtatccagacgatcgactcaccatcaaggccgtcagagtacctggcttgacccaaccatcgacatggtccaggatacgtcgggtctcttttttaatctgcacatcatagcaaacatcctgccagtggaaaatggcggtctgacgttgaatcgtgacatcttccttggcttcctcctttttggcggcttcggcctcgctggtcccgcctccttcaatgtcttcacggcctcgctttggcattttggtgcggggaaagacgatgacttctcccttggactttttcgccttgatcaactcggtggctccgaggtagagagtcatcagcgcgaggataaagacaaacatgaggccgacgtttctatggtgaccacgcaagggtcagtctgacgatcctacgaggctgctcatcgatactcaccgccacttgtgagactgatagtagttgtaggcttggttgatataggcgtctccgttgacgaccggactgccggctacggatccgaccgtcgaacacacgtattgatccgaggcgaggccggtataggctggtcccgcgggaacaaacgaaacgcagtcaaagtcacggttgctaaactcgttgatcatcaaggcttcgaaagcatagctgcgagcgaggaggcatcagggtcgaagcgtctgactttcttgttgcgccgcggacttactagatggggttgagccatcgaatccagctgatccaacccagcatactgtgaagggaggcaagtggcatcaaggggtgtacgtccaggcaaccgagtttccgcaggcttactaggtgggcggtagtgcgaaaccagtgtacaggaccaaagccaaaatcaaaccggcggcgggcgtgagtgcctgcaccagacttctcgacagtgccgccaaggacctggagggtatagggcgaatgatgcaggacgatcgtgagcgcgtgtaccggacttgtagggccacctagacgataccactcacctaaagaacatggacatggcaagggtggccaagaagctgacaaggaagaagaagaaaaagtttccgggttctcgcctcagattggtcataaagtagatgatcaagttgaagagaatagcgttggtgatcttgtacggcatgtcggtaagcatcgaggcaaacgcctcggccgaggggtggtaaaaggcataacgttcgtgtttctcgacgatcggacgttgtgcgtagagcgtgagaatctaggcacaggatagcggggtcagaaggcgtgggcgtgacctggtacaagtgcgcgcactcacttcgagagcacttccaaaggcgttgagcaagacggcaaagaacaagagggcaccacggctgtagaaactgctggtatcctggagattgtcgaggatatcgcgatcagtgaagttcgcatgaggtccgagccggaaccagacctaccgatggcaagttgtaaaagacagagctgacgataagacccataatgatgttaccgaagagcatcgagaatgtcaaactgggatccgccttgagcctccagaaaccacgtcgaagacagagcttgatctgctcgccgtaggacaaggtgtagggcgacttgggacggctgcaagtcgtggatgtcgatagtaagcgactctagccgccccagaggaacctcgcttcgactcacgtgttcttggactgctgagcacgcctcgaggccaaaaactgctcatactgagctcccccaaacggatacttttcgtcgtactcgtcgagcttgacctgaagctgcttgtacgtctcgctagccttccacctctgataaaactcttcggccgatcgaggcaccctgtcttcaaaccctttgcggggtcttcgttccttggcgctggtgagcgaggtcaaaaagtcgggcgtcgactgttgttcgggacaatcgaaacccatgtcgacgaaaaaggctttcgcctggtccgcaggaccaaagtagatctggtacccgtcgtacaagacgatgaccttgttgaagtactggtcgccgagcagttacagtaaatcagccgggttcacgccgacctctcgcctgtactcacgtcgtaagccgcctggggcgattgatagatggcgacgcacgcggtcgatccggcaaactcggtcgacgtcttgagcgtcttgcagaattcgatggcgttggcggcatcaagaccacgggtcgagttgtcccagcattgaaggggagaagccgacagcaatgcctcggcgatcgagacacgtttgcgcctgcaggtcgggacgggagaggacgggaattgctgagcggatgggcgagagcgtactctgaaactcgctatcatgaactcactctcctccggacacgcctcggacgtattcgttaccgacctttgtgtggacggtatgggcgatcccgagtacgctcatgatgacgtctcgggtgtgagtggcaaactcgcgcctggtcagaccgggcggggggtgtttatgctgcaagcaagcggaaagcgggaagcggtgagccagatttgtagcttgatcgacccccgacggcgtctcgactcaccgacctggcctcggcggcgaacgccaaggtgtccccgactgtcaacgcggggaaatgcacgtcctgctctgcggtgtagatggcctcgcctcgaaagttcttggtcatggttttggggctgatacctgttgaacgtccgcgtacgaagcagagatgagttatacgtcttgcgttgatggcgagctttggaaagatctagactcgccttggtagttgatgtacgagccctcttcgacttcgagaccgtgcgtctctccggcgatcgtcttgagcaaggtggaacaaccactgcgatagacaaccagacgacgcgaaacccgcttagcctgcgtatacccctgtgccgtatcgctcggggacataccttcctgggggtccgaggacgaccaacatgtcacccgcatcgagtaccgcatcgaaccccttcaagatgtccaccttgcgtttcttgccgccgatcaactctcgaatcgatccgaaccctgcgtacggggcgttccctacggtctgttgaaacccggtatcgcttccgaacccgtgtacctgcaagttcctgaaagcgacccctgcggtcctcttggggtgtaattccgggtcccgagaagtgacgccgacgatcttgcgggtccaggccttgacgttgaagttttccgaaaaggggtcaagttctccgcctttttcgatcaaaaaatcgcccgactctgaattgacgtccccaccgccgccgccctggtgtctagaccctgcgcggctcagactctgcgcgtcttgatgtcgggaagattgtcgggtgagttgcctggccagttcggtgacccgagccttgttcgcctgttcctcgtccatggggggtacatcatctccttgctcccccgcggtggtagtagtatcgctcgatgctccgaaactatggtgtccgccgccgttgttgttcccacgtaccgggtcccctaggaccggcggacgatcttgcaatgggtactgatcggcacctgattcgtcgaaacgatcttgttgatgaaacgtgccgtgagcgttgccgatccctccgtactgagcggtccggtcgctgttgatggtgaaattgcccacgagggacatcttggaggagaagtctgtgcttcgattcggttcgggtcgaacaatcgacaagtctcgtccgagtgagttctcgttctagatcgctagctagacgatgggtcgaggtcacggaagcgacgactttctagaaacgcgatcgcgagagattcgtgttttaagcgtttgatgatgatggtttgatcgccgtgaggcgggggatatgatggatcaggagttggaaagacgacgtgacctcgattcgagctcggtatatatttcccatcgactagacaatacaatcacttttcggcgtatcatggggtgacagtgcatgacagtgcattttggttcggggggcgtcgatagcgtcgtcgtggccgatgagtatggagctatggtgattccgagacccgggcatcgtaagttcaggtgatcgtgtgttcttgaaggtgtggtttgatgatcaaagcaagtcaaccaacggccgccgtcagcgtcaaacccgcccgtccgcccgccttgacgtgcaacgagcgatgatgacgagatggaagatgacaaatcgggacttgttgccggaagcaacacggggcccgccaatccgacgtgcattttgattccgcgctctcccccagtcgagcttggcgcgcgtcgtaatcccgccggcaccgcaccaacagccatcgctcagacgtcgtcgtatgtcgaacgccctgagcaagggatctgaacctgatctgatgctggatcgacatccatccggctcgcaaagaagaagagggaaaggaggacttcgggatttgtcaaagctcatcatctttcgtcgtcgttcgtcgtcgccggggtgagtacgcgttggagcaaacgagccgccggcgatgacatggtgggcgtgagtgacggaccccgccccgcgggatcactagccccagaggtcgaacgacgtcggtgtggagcgtagcgaggctcgatcgtatgtcccgatacgccatcgccgtacgaagagtgggcacagagccagagctcgtcctttcgctgtagcaaccgccacccacgtgacccgcgagatgaaacgacaatgctgcgcgtatcctcgagctgaaaccagggtcgatcgaggaaggggggggcttgggtttcgacggagttcagctaggggataccgggggggtcatccgacaaaggaggtcttgttcgtgatatcttcagctcgttctatttaatcaggttgagcttgctgctacacccatcttccctggactcgagctcgacctttgactcgccgagtttctgacgtcaggctcgatatcaccggacgacccacacgacacggacgaaaaaagcctacgtaaaaaaaacatgcccgaaaaggtagaaaacgtcctgcccgccttgaacctgaatgaggcgttccctggcgagcaagcgagggtggatgtcgagttggacgagatggctaggaagagggagcaagccaaggtgagatcgatcgcccgctcgtccggacctcgtctccgaatttgacgtcaccaacatgtcactgacccctcaccgaacgtccgcagcaagacgcccaggatcgctacctccagaaagaagcgcgcaagaacgcggaccatcagcaagaatggatgttgcgtcaaaaggagaaacgcaaggacgtctccgtcctccctgacgcttcgaccctgattgcccagatcgaggccgcacgactcatgatccaagacatttcccgcgagatcaaagagtctgacattcggctcgtcctgccgtttcatccgggatactcgagggatctgaccatggctcgacgatacgagctggacaaggaaggggaaaagggacccgaggtcgagttcgtccagctgtttgacgagttgacgagcaattacgccgaggcgctggctaggtttagagcgttgaattggttccccgacgaggacatggtgttcgtcgccagccgggagaccaacgacgtgggtccccctttcgatatcgtcgagactattacctcgacacttttgatcgctgattgctccctcccgcccttgtttgcagctccgacacgacaccaaggacgacctcgaagacctcgtcgcgctgctcaaccacgtgacccctcctcaatcattcttcgtatggttccaagacttcaagcgcgacatcgataatgtctatttcatgcggaccgggaccgagaccttgttgcgtcaatggttccgtacgaaaaaggaccgggagctcttcctcgaaggggtcgaagagggcgagaccaggcggaaaaagttgtttgagcagatggaaaagtgtttcctcgtccaggggttgacggttcctgaagcttatcgctacaagatagccgaagaggccgaggtgagggataggttcggattcatggatttcggtgaaaaggaagaagaccccaaggtcgaggtcaagaaggatgtcgacgagcagcaggtacacgagaaggctgccctcaaccccgagctcgatggaaagacggttgtcaagcccgcagatgagggagacaagcccgcaaagctcttggctggtgagcctactcgccctcctgaagaaggtcagacaaaggacaactagggtgactcttgttgtctattcgctcttgccccctttgtaatactacattggcatgatcattcgccggtccttcttgctcgctcgtttcctcgtcgtttttcggtccatatcacttagacaagcgagatggtggtcgagcgagagagcacaagcgttcgtccggccacgagaaggtgaccaaactggtcgacgcaccgcatgttcgccgccgacgaaaaggcgccgaccgtccgcttcgagagccggcaatcaatacgactggtcatcgcggtcaagccatgataccgaatacacatgcgcaaattgaaccgagatacaatgcactgggcagccgaggtgcgccggtacaaatcctctcgacgcctgtctctttgcccgatacagtctcgtcacttcgatcagagttattggaaagcccggtcatcgggggctcttacctatctgattatgctgcgattgatcagggtgatgagagccgggccgcaagtggcaccccccaatccgtagccaccggatcacagtcgatccagacggacgagatggcaggctcgggaacttccacgtttgagcagtcccaatcggctaccgaagcgacaggaagttcgaggaccaaccccagcgccagatcgagcttcccattctccaggtcaaccatacccggcctcttcaccctcgttgaagaagctgaccgaagtagtatctacaccgagcgatcgtttggatcgactaggggatcgagcgagccggctagcttgagctacgcgccgccgtctacggtattgacgaatcttccgtcatcggtggcgacctggccgagtgtttgttcggatagataactcgaagcgctttgcccttggctcgaccacccgatattgacatgaggtgaggcttgtcatgacatgttcacgaccacaagtcacgatgagacatggtgttatgccatgatgcgcttccaactttgagattcccatgtggcgcgtttccaatcgttcatcacgtgactcgtgaaaagttggtttgtatctctagaaaatacctatataaacagacacagacacttcgcattgcttgacaatcgacactcaagccaacctacatacacacactatactgttacattcagcaacgatgtttcttgtcggctgagcataaatcgtcgtcatcgatatcttgaatactctccacgatgagaccgcgagaccaaacatgacacgtcgccagactcgtcaagaccgtcggtgctgaatggccgaccgaccgtatgcacacggccttggaagtttcatcggcaaccttgccgactctccccccgacatcagctgcaggttcattcggacctgcgcaccactgctcgacccacgatccactcgagatcagagcggtaaatcgatgctcagaccggcttctttcggggagttcgtctggtttcgggaagaccgaccgacaggattcgattctccccttttctgtctacggacgaaagcggggggacgtttccgtgactttgattaagccggagtgatttgacgcctaggtttcctctacgagggccaggtgtcgtccctcgatccctttcgtttttcgcggagggatcgagggcgatggggcactggaatcactcgactacaacttcatacatcttagctcgtagtctttcactttgcctttgtgcaagcaccatgcccaaactgtatccaaattcattgttatcgcaagaacagggtgtcgttgtacaagtctagcggatctgcaatcgtacgaaaaccttgcgagaaagacttgacctctgcctcatccgatcacgctcccgacctttgtcaggacctcgtcccattccccttgcgggtcgctcaaccaagtgatcgcccctccagctcccaagctgtacctcgtatcgcctttgctttctcccttgcgcaagacgggttgatactcggccacgatggttcggatgaccacgctgaggtcgacttgaccgtcaatacccatgtaacccaatgcgcccgagtagatacctcgccgatggtatggattctcgagttcatccaagatctgcaccgatcggagcttgggtgcacccgtcatcgaccctatgaccacaagacccgtttcgacgtgtcagatcacgcgacacctctggcggccatatcgcccgactcaccaggcgggaaacacctctcgacggcttctatctcgctgatcccctgttccaatcgaccgacgacggtagtgacgagttgatgcacgctttcatacgtctcgagcgcgatcaatttgggcacttggactgaggatggcgaacagcaggattgcaggtctgaccggatgaggtcgacgatctggagacatgcagcaagcattagcacaggggactgctgcgcccggatcgaagggcaagacggctcaccatcaggttctcggctctttcctttgcgtttgagcatagttcccgtgccacctcgtcgtccaacgcggcacatctcgtcgcgcagtccactccgccctggcccggacaccggtcgtcccccttgctgcacacgcacttgacccgcccgcgcgttcccttgatcggtttcatctcgacccgcccgtccccatctatgcgtacaaagcgttcgggcgaggaagataggatcgtcgttcccatggttgggaaatcgagaaacgtcgaatagggcgcgggattccgtcgtcgtaaatgcgagtacatgtcgaggggatcccggcgggtcgaggacgatgatgccggtgatacgaaccgggtggtcaacgtgagctcgtacgaattcccatcgtagatcgcctttctgcacttttcgatccccgtcatgtagtctatggacgagatcatgggactgaatgtgggcagactaccgttctgcttgggtggttgaagatggccctgattcgcgtggctcgtcgattcgacaatgtccttggctgttcttgtccactcttcccactcgtgcgagctgatgccgaagcgtagaccgaggccgtctagccaatcgaccatctcgatgcccacgtcctcgacctcttcggtggacgaggcgagcgcggctgtatcgcgtgcgttctgctcaatgaccccacacacgtcccaagatccgtccttggatcttctgagaatccgatcacaccatccccaacaagcatctggcccgtcgccgtcgtcgtcattttccgcgtccgaagtggacctctcgtatcctcccaagctctcgtgcttcatctcgtaaccccaccacccgacccatccgcctttccagcgggtatcgttcggtcgttcgccactttcgtgtctcgacgcagcacgtgcaaacatgtcgagcgattgacctcgatctgctggggttctgtcttgaagccgtctcctgatctcgaccgaaccgcgagagaaccatttccaaaacgtgtcgcggcgaggttcagagtcgagccgtaatcgacgcttggtgatctggccatccgcagggttggcgtgatggcaggtgacggtccgtgatcgaagcgagtaggacaggatgaacgagggaatagccatggaagaagtagtagccgcgcgattctatgagggacgtaaaagaaagccagaagtcgtcaaagtcgatataaacgttgagagaacgaccaggtggccctgactcacggatacgccgtccaaccaggcagcacctagactttgtgcttttcctttatctgccctcctttgcaattctctgaacacctgctcattggtatccacctcgtcctgccgcgacctcgcctcgtcgatccgctcttccaccatcctcaacctcccgaatgccttgccaggccccgcctgtccgggaccgggtgacccggctctcgagccgactctcgaggccgctctactctcctctaccaaccggtaggtcgagctcatcctcagcgtcttgcgtgtcagggaagggtaattggtaggtcgagcgtggtgctcgtgcgttttcagtaggaaggagagtaacagtcgggatcccgaggaagatgcgatggactggaggtgcggtgcacggatgtcgggtcagctcgagcctctcccaccgttttgacgagcgcagtcaacttgcctcgggatgaaattgcacgccgtactgcggtttggatcgatgagccaacccttggatcgtcatgaccggtacaaacgtcccgtcctccagaaccctcttgtcgtcgtgccaagcggtgatttccaggtcatctaccgggaatcctgtggttatgtgatcgcatcgacgtcatgtcggctggtcagtacttccggcagctcaacgatcggggagggattatggaagaagaacgcagactgaccttgtacgggatccactgtcaggctgttgtacgtgaccatgtccaccctctctccctgcttcccattgtcttcccgtccgaacggggccttgccattccctaacccatccccctcgtcgacactctcggacgacttgactccgagtggtgagggcggcaagaggtcaaagatcgaagtggatcggtgggagatggggatcacatgcccgtgcttcaaatctggggtattgatgatctactcgggaatacggcgctcgatccatcagcctggagcgatccggggtcagaggatgggggagggggtgtataggctgaccttgcctccgtatgctacggccagtgactgcattcccaagcagataccaagcaggggcaaggtggtcgtccggatgaggtcgagagcgaacccgatatcctgcaaagcaaagtccagcggcccatgcggatcgcgagaggttcgtcagacgagcacatcgatcgagagtacagtcgaccaacagcggcggtgttatgctcacgctaggtatatcgggtcgtcccggacctggggaaaggacgatacagtccaggtcatccagcatacccttgagaccatccctatcaccgaccccccaggatcatttcagcttgacggtttagcaatcgggtaactatacgcctcgatcgcgctcaccagctgatctcatcggcctgtaccacgacgaccttgcgcttgacctcgttgtccgggtagagggagacgaacaaggagaggaggttgttggtgtaagagtcgcgatagtcgaggatcagagttcgaggcaagggcggcgtcgccgtcttcatcatcgccggcatcatgagaaagacgagtccagcccaggttcaactacgattttatgagtacagggtttggggttgtatggctgataccatcgatatggctacgatgatgatgatggttatcgttccaaaaagtgatttttgaactttgacttgctcaatttcggtcatacgcgaaagttggatggtcgacttgcaagttgatcgggtcgatcctatgtacaagtatacttacttgtatatccttcaatagggacaagtacaacatatgtagcgatctcagtggtactctgcagtctaaagaaccatcctgtctgaccctgcaacaatctcaccccagatcgagcccggatcggacactacagtggtgacccaacctgacctaccatgcccgaactcccaggtcagtctcaccgatccctgcctgagcccgcatccacttcgctcgctccgactgaccagtcccgatttcccttctatcagaggtcgaacgtgcgaggaaattagtggaagagacttgcgtcgggttcaagatcgtgtcggtcgattccagggaagacaagatcgtgtataccggcgggatcacgcacgaggactatgtgagtctggacgggggtggcatggcatgcactttgatccgtatggtggacacgttcccgtccatcgatcttggcaagctcatcccgccgtcaacaatcccatgcacatcaggtgacggaactacaaggccggacgatcacggggtgttcccgcaagggcaaaatgtgagtactataggcatgcgtgacgatcgacccgaatgaatgccctgtgatccgagctgaacccttctccctgctcatctatcagtttctggttggaactttccggatcggggaggttacccgtcatgcactttggtatgaccgggatgatcatggtcagtcccctcgtgcttcctcattcgtactatcccatcaccttttactgaagccctatgcgtatgacgtgtctcacagctcaaaggcagggaaccggattggtacatgcgtaaaccccgcaaggccgatcgactcaaggacgactggccgcctgccaaggtgagtccacccgctatgatagatcatactggacgtagcgagtttactgatccttcgacaaggcgtggtcgcggtcgtgggagtagtacgtcaagttcatcttgaaactcgagccgacagtgggtagcgtgggggatgaacccgtcgagctggcctttctcgattgtgagtgccgcctgcgcaagacagttcgacccttgctcccctgtatatactaaactctcggacctacgatcgcccagcccgtcgtctcgcacggctccgacttctgccccaacctcccttggaccacccgcccctctccgtcctcgggttcgacccttacctctccggggagggcacaggccgggaacggaaagagacaaacgcgcgtgtgatattgcgatcactacgtcattgacccaaacgggaacaagcgcgcgatcaacccaaacaaggcaatatccccctcgcccggcggaagggtgaagcgaagaaagatggcttgatcgccctccctcccttccgaacccaaaagcgtaaattccaaaactagagagacgcgcgcgcagcccctgatcgacgcatcaactcccgtccgcccgtccgtccgtcgccatccttctttcggtaactcgccagcgccgaaggatctctttcaaccctccgggagcgagcgcacagatcccaagatcaatcggggaggatccagagccaaacgggaaaaacacaaggtatacgcgtttcatcatcatcatcatcgccatcgaatggcctgccctctactacactttcctcactttcgaccccgccacattgttcgcaccaaaacgaccaacgtgctgccctggatgacgagactagtaggcctcctgcatcctactcgtcgccatatccctccaagtgttctcaaacaacaacggtttgggtgggttcaacaccggcgcatccctcaccaagtgtggcaacatggtccctgcctttttcgctggggttcccatgatgatgcattccgacacaccgtcgatcgcgtccgtcttgccgtacagtgccgcgtcgaacagatgatccgtcgatcgctcgaaagagctatgagcaaggcgacgtgcaggtgtacacgtcagcgatctccatctcggttagacggccatgatcggttgcttacgagttcatcaagaccgagtcctttgacttttggataccgaaccgagtgatacccagaatttgaccctgattatttccgggcaacgtgtcagctctgccgacctccggatcgatccacgtcgtccgcgaccactcaccttgcaagtcatttgatccgccaaaaggtagacgtgtcgagggtcaatgttcaatccgtacagcttcatgacgtcctgaatctcgttatagatcgtctgtcgggcggcctcgataccgagtactcgggccatctccatgatgttgttcgatttggtcttgacaccgagtacacctagaaattggtcgatagggtgagcacgtaaagctcgactttcgagccaccactagcccctggggtttttgacggacctggtgtgttcatgacctctagcaacgcgtgaccttcacagagcaactcccggagttgggtcttttcatcttgcttgatgatacctcggacgatcggagccagaccctagaacagccagaatattcatcagtctctcgcacaccacggacggtcatgatcgcgccatgactgaccttgacgacgacgctcggcagagcacgtttcaagctcttcagccttccaaatttgtcatcctcttcgataaacactcgcagacggctcttttgagccaccacgacgacctggttggccttgataccaagctttggcgcgttgacgagcgcccatttgatgtcgtcgagcgtgagctccagctagtcgcgccaagtgttggaactattagctacagacactctgtcgcaagacccgttttgtagctgcgctcacctgcaacgcttgaacagcacgtgtatcgatatggattccaataaacacggccagactgtcccatgcctcctcgatgaccgaggcgatctgattacctgatcttgatcagctaaaagcgatggccacatcatgactctgcaaactcacgtctcccaatgttgtgcgctcgatcctacccttgacgatccgcgcagcgatttcactatccggtcgctccagagctgtagtgatgatgggcgtgtggatgtccgcgacggcgttgatgacctctttgatacggggcactcccatggtcacgttcatggaggcaacaccagcgaaatggaatgtcttcaacgtcatttgggttcccggttctccaatagactgtgccgcgacggctccgacagtagaacctagagacagacaaagagtcatcagaagaaagccgtacttagaacaacacactgagtcataccaggttcgatttgcgctctgagatatttctctcgacattgctctaagaatgactgaatgtggccttccgtaactttcaaggcattcgaataccacttgacgatatcatctgacgtaaaaacggagacgtcaaatttaaacgcttgaggagaagccatatcctggtatttaccatcatccagttccatgatggcgattcgaccaatgtccttgtcgcgggcatcgcttgccgcaaacatgcccagcttgctccgtagcgaggcgagtgcgttaacaatgtgctcttcgataaaggctttcgtctccttcttcatcgttgccgatactggatcccagtgtgcactgtccatgatctcttcggcagatgctctcacttcgaaaggtagcagagcgtcacctgctcgaccagtgatggcctggcaagggaacagtatcagtctcgtggctcatccttgtgacactcgtcagaatcgaactgaccaaggcgtgtgaccacgttcgcgggaaggctactggagcggcttcaccttccaattcggctggatcgagtcgatcatcaccatactcgaattgcacgatacctccgaccgaatttcggacagtgtagtcgtactgcgccgtgagatcctccaaggcctgacatcaagaaacatacggactgtaagcatttgtgactgcaggaggcaattgcaggaggccagtcgtcaaaggcaacaaaccttcattagacgacgggccatgtatcccgtttcagcagtcttgacagctgtgtcgaccaatccttcacgcccagaaatggcatggaacaaaaattcgtacggggcgagaccgctgaagaaactgttcctgacgaaacctttggctgcgggttttcggtttttcttctcgaaatgcggaagtgatcgatcgtcgaaaccgttaggaacacgctttccggcgataatttgttgtccgaccaaggctaccatctgcgcgacgttgatgacggaacctatacaacaagcggtcagccgcccggaaccatgtgtgcgcgtggcgaaacttacccttagaaccacatgtggccatgatcaatggtgcgttgtggcgactgagttccttcatgcagatatctcccaccgctgcacgaaccgcactgagcgttccagaaatattcgtctcaagggtaccttcttgggtagaacccggaagatttgccagtttgcctcgctttgcttgatcgataaagtcgtcgcagacgtcatacgcttcctgtaccatccgctctttagtgttgaccagcgccatgctaggtgtcacatcgttgataccgatcgagaaaccgatgttggctagccaacgagccgaaaccttggccagccggttcatggcgaccgccgccgctgagggaccatgatctcgcaggatgacaccgaataccgaattcttctttccatctccaactgtggccttgtcgaacacgccagtcatgatttcgctgttcctgataaccaggtatccgtcattgggtgccatgtcatccacgaattgatcggcagggtcaggcttctgcatggtcttgcatttggcttccaggttcacgaggatattcgacttcttattcggcctcatcaagatgttgaagacctgcttcccggtccagagtcggatgggcttctgaattacgggtgggggaatctcgatttccaagcccgcatcatcgaagtatgaacagatttggcagaactcggctctgtccagcagccggtccttgatcgataacaggtaggcggccgtgatgaaatcttgtgtggcagcaatgataggttctccgttcttcggtgtaaccaagttcgccttgactgacatcaacataagagcttctgtcctagcttcttccgtttgcggtacatctggatacgacggaacagaaatcagttacgtgatcttggtttttataacgtccgaactgcttacgcaaattcatctcgtctccgtcgaaatccgcattataaggagtacaggcacactcattcagacggaatgtttgccaaggtcggatttttgcctgcaaagatggcgttcagtctgagcgatcggatttcatcagaattcagcgcttgacatactcggtgacacatgatggacagcctgtgcagactgggctgccgattgaagagtaccatgctgtaaaattcgaaagtcagtcaaccatctgcacgtctcatatcaagatgctactgactctccgtcatgtagatgtcgctctaccgtatcccctatccgcaaattacgagcgacctctttgatgtccgcaaacttcaaagccttcttgaagccccgctccttgtcaataacatagttcgctccgggatgcttgttggttccgttcaggatggcctttctcaggcggtcgatgttgtgatcggtgactcgctcgggataagtcagtttcctcgccactttgacaggcacagcaacctgatatgggtagtcccgtcagtcttgcggatgagcaacaggcagtcgagctaccaacctcgtcgatgttcagatttgggtcaggtccaatgacggtacgacctgaaaagtccactcgctttcctgacaggttaccacggaaacgaccctgctttccctttagacgctgacagaaacctcggataggcttcgtgttctgttaagggggcggggtcaggacgacttcgggccgtaggatggccttgcatttgtgcttactggcatggctgagcccgtaggtgtcgaggaatccacatacatggctaccgataatgtcagaaattcccattgttcctgtcgatcagatagcagtattctcatgagcggccaggttcttcgcagaaggcgaggtaattcggacgtaccataatcagagcgataccctgaccagtccgcaaggacgcctcgatcagactacaacagtagatgatctctgaaagttttaccgagagatcgtcttcattcgtcgcatcctcctgttgtaccgtcggtcggatacatgtgggtggaaccgaaatatattgccagagatagtcttctggtcttgcaactgacgggtccattccgagcagctcgacgtcctgcaatgcccggcgacggatgtcagattcggtcatacgaaccgtctcgattgtccacgactcgtactcacctcgtctgacattcctttgaacaattccaagctcatctgagcggtcacatcaatgatgggcttcccgacgtaggggcccaactctggctggtcccgcaaaatcccctggaaaccccgcttgtactcgtcgagctcttcctctcctttccaattccggaacggttcatgactgatcttgagcggtccactcttcttgacgacaccgttgacagaatcacacgacggacaacgccgaactgctcgacagaggttgttcacctctttcgcccgcgcttgtcgagtcatgttgtccaatcccggtcgacgaaagatgccgaggtattttcgacgctgtggaaagtcgagcatcacggaggaacatttctaccatatcggacgaacccaacgagaaacaggggaagagttagtatcgcctcaaactgatcgggtcgttcaaccgaacgataagcggctcaccttgcatatgttctggagaatcttgatgcaatttctaaagtacccgatatgatataccggcagaggaagctcgatataggcgtagtgtccgacgcaatccgtcaatggcaaatggcatgttgagcatattcccgttttcgacgaggttccctatacacatccccaagcgagaagattcagcgagatagacctgcgacgaaacacagctgttctatactcacgagtctcgtatccaagacacctccgacctttggcgactttccggcatctcccaactggtacatttcatggctgacagcttgaaattcggatatccgcacgatctgttgaggcttcatcggctggaattgaatctccttgatcctctttggagcattgctcgagacatatagcttgtcattcccctcatagggcgccctccaacccatcttggcggtttacgaggcgtgttcgtgtgggttcgtaagggggtttcgtagacgtttgtaccgggtgctcttaggcctgtctcgagctgcgttcaagggctagcaggacgagtctagctatgtcgagagcggcatgaacctgcccttgaattctatcgggctgattatatgggtagtcgtctttacgattgcagaatagctatcgcgatcggctatcgattgacaaaagttcaactcgaggtccgacactggctgggattcgacctcggaaggcaacttgaggcgtgaatagtcacgtgacgaagtggaatcacagaaccggtaggtcctgcttctaggtaggtcagcaaccccgatagtagactcactcggcttagtaacattcgttatatcattggcctcgaagttccaagagaagcctcaatagcctggccttatttcgttgtttcgttggtcaaaaatcccagaatccaacctagaaatcctagattgctcgacgttattaggcgaatgaacaggttcctggcctgcgcgttcgaactgactttgtaaacaaaagcaagcgtcttgtctgtcgaacgtatatttgatcgtccagtcgttccatcatacacaacatcaacctgggtatcgagtatcaccttcgacccgtatagacacaaatagacaccagaatctacccgtattcgctgctcggagtcatgtctgacaagaagcaaagcatttcaacgcgtatgcgcatgccggtaagctcgaagactgcctcatcatctgccctagggcctttgtcctgatcagcagcggtgcacagtacctcaacgaggttttggccagacgaacgcgaccgcctctcgatctgtggtgcttttatgtgagctatgcgaggatagtggcaaatattagagatcgagctcattcgcatcctttgatatcgctcgtaggtcttcttggaccgtctcggaaacggagagcaggatctgttggatttctggctagatgtgcatcaacataaggccctatgtcgagcctacttcaaggtgagtttgtcccgtacaacacacaccgcttgattcaggatctcaaatactgatcgcttcactttcaggacctgcatcgcacagggaccacggtcgagcaggaatggcccgacttttacaattgggcacgtcaacacggctcacactatgccgatgtcgccggtctacaaggggaaccgcggttcaatgacaacgagaccgagtttcgggaggccgagaggagagaggccgagaggatgctgaacgaccgggattcggggctcggtagcaacctctcgcacagggagaggagggacaccgagtcgcatggtcctagaccgatgacgccgacgtctccggcgtacgcgcattcgacctccatcgataaccgcatgggccaagctactggttcgccgttttctcattatcaacaggatcatgcccgcgggaggggcggggacgataggaacggtcagggaggatcgaggcgggtcagcggtggaccgaccgtcattcgaaagaatcaagccgtcactcagatggttttattcacgagtgccgagaggatttttgccaggtatctaatggataatgctgagaagcccgtatactttccgtatgtttcgatcagttcaagcgcttagcacaaccactagactgacgatccgtcttcatgcagtgcccacctccgcgtgcatgatttccctaacccacctcgtgaccagcgcacgtgcgatcccaggatcccagactacttcaatactcagcaggattacgtttacaaagagctcgagcagcaatattatcccgctttcctgcgagaaaaggggttcggcaatctgacgagaccaggagtttacggatccctgatcgcggggctgttctgtttatgggccggctttgtggtcgcattcaccttagtgttctacgactacaaacccaaagtcaggcgattgggcgtgagtctgaccgtttggagcgctcgtgcgagggagatcgagatgacttacctggacctcctttctcttccagctcatcgtcccattcttcttcgctttctactttctcttctccgcctactgggcgctcgctccgcacctggtactcctgagaagatccgaagtcggattcttcaagactgtgaagattcgggacgactatatcatgcgtttgcatgcgggcagggcggccatcttgatggcgtttgtcattctttgcacggccattatgaccgtcatctggtgggctgtccccggacataggctgtgatctgttcaacgacttggacttttgaagtttagatttagacgatatgccagcgtgtataatctagtttacgaccttttgatgacctaagtatcgatctgatattctcttacgagccgtcgcggaccgtccatctggcgctaaagtggacagcgcaacaggatcaggagctcaagactgtcgctaacgctcctcgctatcatcggcgtcacaagtcgggtgacgtgccgaggaacgcgacacaggacatcttgtggatttcgataattgctccgcctaggaaagtcccggatgccgtcgacatcccccgtcctgagagatgtcgcgagcattgcaagtatgcagcgattgcgttcactctccggcttccctaggacgcctcgtggtctgggaaagggaacttggcgaagtgtgcgaagtgaacaaggggagtcggctgtctttgggaacccatcctccacctgtcgctgcctcccagcaatatcaccgaaggcagacagccaacaatgaccatccgggaagtcggctggtttaacgatgctggaaggtcttagcagggggtgatgggacgactcataatgagcttggcatacattacagctgactttctgcagacgcggagctcttgtcgtatcatggttgaacaagaaatttcccctttcctcattggtgaaatcagctgggatggaggatattaaagattatctgtcacatgactaacctgatcgatgcatctcgcatcggccggagaattttaatgcgaactacaggaacgatgacttcagagagagtatcaatgagcgcgacaagtccaatattgcatcgcgctctagcaaagtcggcgtagtgagttcattcgaggccgcatcctcgtccgttcaactcggagcggtcaatgtcatctgtccaggagctgggagcatctgtaccgtgcatctaatcgcggtccaatccagacgagatatatacacatcagagttgcgatgatgttcgcctgaatgcgaggtgcgtgcaagctttgacctgacgatcttttcgacccgtaggtttagcctcagccctaccatacaatgatgactgtctggtagtcttgaaatgtctctagatctcaagaatatattttcgacgcagcaacaagcgaactcgcccgtgggagctgttccaagggctgatctgcattattttgtcgtccaaaccgttcatagatggtgatgaagaggtcagatcaatatatgaggaattcctctcgttcttttgccgttcgtacgatcgcaatagcctactaacggtcactgactgaagcaccctagacggagaactctggcagactttcgacctcaggtaaagcgggtcagatgtcttcttctccatcatgccgaggggtagtttgatcctagatcacgagtgctgggctccgtgtcattgaattctccgaagctgaaactgtcgtccggcgctgcggcgaaacgctgcctctgaccggatccaaaatagtatgttgacgtgattcggtcaacggggtgcggcccgaagaccgcaccgcaacgtcgttctcgctggaagttggagtcgacgactctctgttttgcatggaccaacaacatacagctagatatcaacgttgcagcccagtcctgcaattgcaacaagaccatcgtagtctcagacattccccaaggatctcatccctctaagttttcatctctctcgaacgcgaacatgtctttcgtctccactcgaatcgccaactctggcttgcgtcagctcggagcccaaaagcaggtcctcaaggtctcgcaaagagccatccgaaacttttcgcaaagcccggtcgtccgaaatgaaggatatgaaaagcacagggctcaggtatggtggatcgttgtttcgacccagtgggcctgtaaagactgatatgaaacgcttatgatcaggccaaccctcctttgatgggaaccaccaaggacatgagccagcccttgcccaaagttagcatcgatcaggtcaggactggcgaatccccccgtcgattgtgctgattacgaacacacatcgatcgggtttacagactgatctcagcgaacctcaatcgaagccgagccagagcctgccattgttttctatggtacgcatttggcttcggtgagggaatctcgaggcagctcctcactcacgtcctttcgtgcatcccagtcgggcaaggtctgcattgttaccggcggagctcgaggcatcgggcagatgatctgtcgagcattcctcgaagcgtgagtcgatgtccccttcaaccattttctcaatggctgaactcatccatcttcgcagtgaatgtactcagctggccatcctcgacctcaagaaagaggacgctgaagcaaccgctcgtgagctggttcaggctttcgaggagcaaggtagcccaaagggctctatccaggcgatcggactcggggtcaacattgctgaggagaagagcgtgcaagagggaatgaaggcggtcatgagccagttcggacaagtcgacgtgagcgcgaagagtgctaagatgcgatgcactcgacgttgtgcttatcaagcatgttgcatcagtgtgtcgtcaactctgctggattctgcgagaactttaccgccgacgactgtgagtttgagcttgcaagtccagatcaacctgtgcctcgcgctgaatctagtccattctccaatcagacccaactgaccgactgaagatggtgagcgcagtctgggccggttcaagggacagaccgcactgaccttcgccggcaatcgtagctctgcgatgtcaacatcttgggatccttctacgtcgcaagagagtcagccaaggtcatgaagcccggctcttctctcgttatgattggttccatgtctggagtcgtcattaacgttccccagccccagaccccctacaacttttccagtgagtgtgctgctccatggttgcgtcgagatcgattgagctgagcatgccaccactcgcatgttctagaggccgccgtcattcacatggtcaagtctttggctgtggaatgggctcctaagggcatccgagtcaactgtatctcgtgagtcccgctgggtctttggtcgaagacaagatgtctgactcacaggtcgcctcaagtcctggatacgtcttgaccaacctgaccaaggtcattcttgacaagaacaccgagttgagggacgaatgggtcaacagggtccccatggtgagttgctacgataggtcacggagcgcactgactgacagaccgaacctcggttactttccagggtcgcctggtaagtcaatcttgctcaaggcgatagatcgcagacactgattacctgcccctcaggccaaccctaacgaccttcgaggagccgtcttatatctcgcctcagatcaatcaagttacacgaccggatcgaacatggtgtaaggtctttcggccgggtgcttccggaaacacagaactgatttttttttctgactcgcagcattgacggaggatacacgtgcatttaagggcgtttgacagacgtgcccagtgcgagggcttcttgaaaagcatgctggatcgacagaattaggttcttttagctaggaacgtgtaaacaaaacaggtgatgtgtcatgacgtaatgacgccgaaatgactttggcaaccccctgtcgcttcatgctttgtcctgacactgcgttggcagtttgaacggtttaagggagatgctcatgttccgcctgttgtccatgccgagtgtcctggttctgcgaaggctgcgattggcacgggcgctttccgtgttaaaccgatgcgcgttggtagaagacagcagatgttcttgttccccgcgagctggcttgagtggctgtgccaaaggcgaactccagccgtgcgaaggtgcggctgatttgggactgaaccagtaaccaatatgtgccgttcggtcttcagccatcagacgtaccattcacaaaaagactcttcattctggttaattgctgccctctgtaaggcaacccctgtctcgccgttggtgaaattccggtatcaaaatcggaattcgaagctcgtatcatcggcttcttgcgcgcggatgggcggcctcgagggacttgagttcgaaatgataaaggttgggctatcggaagcgagtcttgatcgattagcggagaagagacgatatgatttgcgcggtgcttgttgtccagagggattgttctgagcttttgtttggtttcggtcgagagagtggttgactggactgtgtaagaagaaaacagaggcggagcctctgctgaggccggatcgcaaaacatcctgcacatggcggagaccatggactcgggcgcgataatcgtctccgcgctcaaattgttggcgacggtctcggggattgttgctgtgtgcaccaccgaatttctttgtctctttaatcgatcagcgaccctttctgcttgttcacgacgcttctctcgccttcccttcgatgcaacaggtacaggcgtgatgccgggatctctctcgaacccagcgtcggtgttgacgttctcggtttggttgaccgtatcgcgctgaatcagaagcgaactcatgaatgtctccattttttgtagactagatcgtccttctgcccgcttgtctgagattcttcttggactagacttgtgatgatctttcttcgattgtatccttgaactgcgctcagccggatgcacgctttgcgggataagggcagccggaccgaagacgtcgtccggagtccgaactgctccagcctcgcccgctaagttagctccttcggtgctccgagttggcatctccgtaacagccgttctccgctgagccagttggacatgttgcggatgtgatgagggtgacgtcgactgaaatgatccttcttgcgagatgaaagcgattctagctggcctcctcacttcccactcctcgacccgggtccgtccgtctgatgccaaatcgagtcggactttggggatctcggatggcagcggacgagaataaggcgagattcgagttttgcaaggcgacttcctgcctcgtttgatatcgaggcgattcttgtttttcttcgtgctgtgcgagtacatcgatcaggttacgatgccgtatgcgagcggaaccggcaaacgcgtcacctgggaaacatgctttgcctgtgggacatcttgagtgtaggcaaggcagttggagtcgcggtaggagtagtcgtagtcgggctttcactggttgggaattgataatgatgcaaagcgggcgtgatcgaactgatgctcttcatgtatttggggtccggtgttggaaaggcgggattcacccaagctttccttgtgttttcaggggatcgagcatggatggatggatacggattggatggaaggttgatatgcgaaccagggtggaaatctagcgctcgaatcttcttgacggatttcacggcagattccgccactgtgcgacgtcgagcgggtttcggtttggctaacttgtcttgtttcgggtgtcgcgatgtcagacgaacgttgggacctccgtgattcgaagtgggcaagatctcgcgatgcttaccggcaaatcccgtctgcggacgagtcagtgaatgtgcatcagttcattgacgaacgactcatgtggtcagaaagcgtgaagactagcctgatcatcatgcgacgcttcggaacgcgggatcactttgctcgaaccgtcgtccgatcccacctgctttttttgaccccgtgttgttaccatcgccaacgatttcctggacgaattggatgggcacatgggctgctctcctttgaagattagcggagcaccgggtctatcgacctgagtgtctttaccccgtctactttatcgactgaatgatgcgaagtgattgctcgctgctcgaaacccgaggtggaggcttggagttgacttcggaagcaaatctgatgttggtgatgatgatctcggatgcaaatacaagagagagaatgatgaatcgtccaaacctcgacatcttcgaacatacagagtcactgttgaatcgactttatcgatagcaccccactctgacactcaatcgtagcttgatttcaccggtacactactgcactgtcatggatctcgtaccttgtaagcgtgcaccccgtcattagatttggcaacccagaaggtctaatcatctgattataatcgtcacagttatctaccacgagaagcaagaccgtgacgggtcgatgctgtgtgagttcaggttttgcattcgtctatacgacgggatctgattgagctatatcctgtctcaggtgcacaacactgtctgtcagtagttccctgatcgagacgttaccgcaccgtgactttgatactgaccagcctttctgtgattagtaacaacctcttacaacaaaacctctattcccctggagacttggcagatttggcagccgagtaagtcttcttgtaaggaatccatgtttctaggtgacagccaagctgagctttgactacattcgccatagtctcgaccagcaggaaaacgcagaattgagtacaggtcaacagagcagggacagcaataatgcggatggtaccggcttcttctcgctcgctgtgctagagaacgtaaggcttgatatcggacggtttcaacaccgaggctcaattgacggcgtctttggtctgcctaggctttgcgggtattcgacctggaattggtcaggtggcgaagtgaagagatgaagccttaccaggacaagcccgagtaagtattgaccgtatcgcacgcgtattgcatacgcttgaactcggcagagacatctccttttcatcgcagggaacagtccgccttcatcatgaacctgcaacaacactggcttcccctacgccggttcgccggatcgcccgaccgctggtacaacctgaattcccttctcaacggtcccgaatggctcagcagcacgtatttgagcctagcaatcaataccgccgaagatgaaggtcactcggtcttcgtcgtgcgtaaggccggggataatgacgctcaaaaaattggattctcggctctaccggaatgccaggcggatttgatggggttgcagcttgggtcgccttcagctggtcgaggtgctggtgtcacggatggtgagcaaacaggtctgaaagaggtctcgctggtagtggattcaccacgcagtcgttcctgcagacaacgtctcgacttcgaccgaacgatctcgtgcggaattcgaaaggttccagcgtgagcagatggaagcgttccaggagcaacaaacaacgggaggtctcaggaatcgtgccggagccggaatgcctcaagagggcacgtatgccggtgctgcacagactccggccactctgaacagatttcaacgaaccagattaaaagaggaggaagatctgagaaaggcaatcgaggcctccttggcagagtctgagaaccaaggcacgtcgctcgcaaattcaggtcaagacgcgcggacgaatgagacggttcctcttgttgcttctgatcagccggtcgacgagacgatgacgacgacgatcccgtcgacgccatcggcaagtcctgaagagtcggggaacaaggggttcgtagatgggttggtctcgtctgtgttcgaggcaagtcgatcgagtctgcagaccatgtcagctggtttcgttcacttacattgcatgttcaaacttgttaatagcccggagtcaatgtgccccttttccaaggtgagtcggaacacgaatgtctgaccatgcgggctgcagatgttctgataccgcccaattcttctctgatggacagcaatgaatgcatcgtttttcctcttgatcttgtcacttctctttctcggatacatgacggactggaacaagcacgtcttgttcttgatgctcgtcagtaccggtctctggatgacaatgatctggtgagtggtcggcaacaatgtcgaggctcaatcgtatagctagctcatgctgtagggtattgccgcaggtttgtacaagaactttcgagggtgcagcactctcagcaaaacgcccctcccagcgcggacatttcaccgggactcgagcagacagaatcgacgaagaaggatttgtagatggcccattctctcgttcgattgctttatacatattggccaaagacctctacaaagtactggcgagagcctacaagttctataaatcgtcacacgaaagcctagcgcaaatggcagcgttgatctgaagaaatgggaggaggattgaattgctgatacttcatgaccatgtccaaggtggcgcttgggctgttccggatggggtaccactgaggccgctaagatcgccttgcagcgacgccgaagacggcggttgatcaccgaagacttggttcaacatggcactgagactttgtggggatatgttatcgaatctggttaggcagaacggcgtgcgaatgtcagcctgacgaaatgcatctcaacggacgctggacttgactgacagctgttgcaattctggttgctccggtacatattcaaaagcctgtgatgaaccggaggacgtgctacccatgaaggccggctgaccggataggtcgaattgaggctccgagccaagcatgagctgtccatcggtgactccttgaagatacttctggaacatgctctcgagttggctagcgtcttggacaccgctcggatccaatagattgggcgaaagtgatgggttgccgagcgattcgctcaagacagatggcaaagtcgaagtagatgcgggattaaagccgtacggcaacccgccttggtatacgaagttgttgtcagtgaatacgggcaccgacagattggtcggtggcaagatgttgggagatacatgagcggtaggcgcggagagcatgaagtcagcttggtgatgcggttcttgcggtacatgggattgttggagctgatcatgagcccggtgatgattcatctgggtttgttgttgttgttgctgctgctgctgctgctgctgctgctgctgctgttgttgctgttgctgttgctgctgttgctgcattatcaggaacattgctgctcgggccatttccggcgatgacaaggccgggaatgatgggttcgatatcgccggaccggtagaagcgggggacggcgcttctcgacgaggggcgagtgatgcgttgcccacgtattgttcgtttggttgaccagtccacggattgaacggcagttgcgcaacaaggtcgagaaggttcgggattgctttctttgtacagcagtcatcaccttgattctcagtgtgagatggttccgtatgagtgggctttctgtccggcgcggtctgcgattcggaggggtgttttgcaacctggctattcggtgtcactgtgccgctctgacgacgcgaagatgaagaagcaggtatcttgtccttacgaggccctgtactgatatggttcgtcatagcggatgaccgaccagccgcaacagaatcttgcatctgctgggatgtgggtcggggcatgatagggcgcagctgcgacccgccatggcccttgctgggcgccttgcttactgaagccgctcgagacaatacaggtgtatcgtgagtaccgctgtcttctttcccattacgaccttcatttgggcgaccgtttgtggcccgcttcgacgtagcgctgtgattgttgttctgcaattgcgccgcagggtccagggtgtccgacttcttactacagcatgacgttgcttcagtgactagagccgtcgtgccttttcccctctggccgtcctgagactctgccagttccattgcgggcgtaacggtcctcgaggctgccctttcggtcctgtcgcctatcgaactctcgtccgagatttcgatgacctcggcgatgacaggattgccacccttatttccgctgcaacaactgtctacgacattggttgcgtcatcgatatcggcaatgagcggttccgtcatagcctcatgatcattactaccgggtttactctcgccattctcctcatctggtccacatggacaggtagaacagcaaccacagcagtcatccaggcattgacacatgcccggctgacattgacagcgactggagaagaggcaaatgggatcaacgtcacggcgatctagtcgacctgacaacgcgctcacccgttgcaacactccagtggcttcagcttgaccagacccatcgcggtcgctgcttcgtcgttccaaagtgctgtaggtggtaagatgcccatatgcaaggcatccaactcaaaagcactcattgggctgcgcaatcccgaagaaggagaaggcatgctataaggagtcctcaattgggccggtggcggaatcgaagacgcggcgatatcgatcaggtgctgtatggactgcactccaggctgtacgttgacgtggctccgacaatcgaaacacgatgtgcaagtcgagggacaagtgtggacgccctccatcgcgtgaccatcctcctccgccttgaccctgttggaatcgttgttggggtgagtcgtgcatccggggcagagacaaccttcaccgcatgtacagccgtccatatcccaggattggacggtcggaaagatggcaggcaatgtcagatcgacggcctgttccgagtccgcttctcgaatccgaggcagagtgacgggcacatcgtgatgaatgtgaggggtgaccaccggcgaggatcgtcccgacgtggttcgcgagagcgatctcctccggctcatggacgaatcacctgatttctggccatgattgtttttgtatggcgagtacaacgcagtcttgtggacgtgtcgactggaatgcgacgggtggtgatgtgacgacggcgtgatgccttgacggccagacatgtccacctgcaaggacggccgtcgatcaagtagaggggtcacactcatctctctttgcaaaacgtcggcgagaccgtcaagatgatcgggagtacgtggaggttcgcctccttcattgttggtcgaatggcaacccgagctttccgaactggcgctagtggggaccgcagtttggcagcatttacacttgccaccactctgacattgacacgggttcaagagcgcgtccactgtaaaatcgtcacgcaaggcatgtaccttagatctaccggtcctacccagatcgtggaagcttcgactcacgcttccggagcttgttatccgtcggtccgcagcaggacgacccgttctgcatcgcactcaacgcatccgccgcatcgttcatagcatgtacgtcccgtagtccgttcggaaaggccgcggaggaaggttccttttgaggcagtttcttgggtgcagggcccgttcccgcacattcacactagggaaggatgtacggacgattgaatcagtatgaagatatccaacaagcaggcttgccctattccctttcaccttgatatgcagttgcttctccgatcgcaacttccggcagtgttcgcattgagtgaccggccgtcctgtcatcgcgtctcacacgagtcatatcagttaccggcagtagccaccgcttcaacgttcggaaacgcacctttcttcttgacttcgaacaggggacgatcggtatgcgtgcagcttcctgaccgatgacctttgatgcacgtcgcgctggaaagagaagaccaactcgatcagcttgatgatccatgtcgattgcggggttgctcgacaagcttaccaagagtatttcctatcatggttgggtcgggaaatatcatgtcagtgcgagtagctcgactcagtgtgagatcgaaacgattgacatacttgtcattgatgagctgttattcgaacgaggaggtacgtttgagtcaactcccgaatctttgcgactaccgtctgcacaactcaccaccatctcgagccaagtccaccgggatatgtctgtagcctaatgggattcgattctgaccggatgcccgacaacagagatcactctctatatcaacgcccagcgtcgaatgacaaagactgtatggtatctcgcaggcgatcgtcggatttcccgtcccactatccagccatatcggtgatccgtccgttctggtcaagccgggccgctcgccggtagaggaccgagacgacttgccaagctgatcgtagttcttcctcaccccaaccgagtggattctattcctttgtgcggagcaacagcagcagcgatgaaggagagatacggggcggagttatgagacgaggtcgatgaactgatgagtcgatgatcaatcaaaagacacctactagtgtctctccctttggcgaccttgtgcaaaagtctgatcgcgcgggatctcgccgaaagttatgaaatcgttcccgaacggggggtgagtgtgtgggacgtggtgactagccccgggcaagccagccttcggaccgttatcgctgcgattccccgctagcctgccaacaagagcaccctctcgaacggaacaaccgatcgagattaagaaggtgtatgcctctccggcctcgaggagagccagccgcatctgggcagtgtctgactgcaccctatctcggattgcaccgcctttaccgtcgacgccagcgcactccagaattgaagacgctctgctcgtcgcgaaaaagtcaacaaacaggtagatttcgccgtcaactggctgagcttctttgctttcacttggtatcttttggaaagccacatacaaggtcgcaacgacgacgacgaaatggcaaaagacatccagtctagtctagttcggatgcgatcgatcatggtgatcagaagcggctggggaaaagatctactactgtacacactaaatataaccttgtcattctaaaacgatcgacccctgaaacgccgggtctcctctaaatacttgatggcagtctcgcgtcggatcaatgactatgacctccaagtacggcgctcaggatcaacggcaagatcatgcctcccacgagcaaactaagtcggaatcccttgctgagctcttcatcctctggagcgtgctgatgagcgtgtgcatgcgtgttgtggctgtccgagtcggaaagaggcgaaatgaccgtggcgacgtaaaggaaagtgcctccctatcggatgtgcgagacgacaggaccgggataagcaaagatacttcctggtcgtaacacaaatacggatctcgagtactcacggagaacaacaacaccgctcctgtccaccattggataccatcgatatcgtgcttgcctacgtgcgcgttcgaacctccgaacaacttgacgagaaagtaggtgaggatagcacccgccggtgccgaggccgagaacaagagcaacctggttcggatctgggcacgagtgagcttctgagatagcagcgtcgtcgttagaccaagcgcggtcgggcctggagaaatacgaaaacgatcagctccaacttggcgacaagcatccagtcacgagaaccgatgctcacctttgtgtacaatgacagccagaaagataacgaaaccgagtgaacccttttcgctcagcgagctcgcgccgagtgcgatcccgtctgccatggcatggatgaccaatcccaacgtcgcgttcaatcctgctagacttccttgtcccgcctgttcgtcatcttccccaccagacaacgacatcttcgagtcccggcgtgaccgtcgactctcgtaggagggccgcgtcttggggaacaaggtcgtgctcgagttcatgcgttcggccgacatcctcgggtccgtggccaggtcggaaatgtgagagttttgagcgcgaaggggcaaacgggtatcatgcgccgacagtccatcgagtggcgtcggcgatcgggatggagagtggtaatgaccattctctgcagatgcttcggctgcgtgttcgtggtcgtgctcatcgctggaagggtgcggcgtgaaagattccaccctgcatcgtcaacccatcagcaataagtccggctaggtgtatgaatcagacagcagcggactctcgcgacgctcacatcatcatcagggcgaatccggaaagcaatgcgattcctatcacatgactaggcgaggtcgtctgatggttgtgatcgtcgtggtctccttccggaaacgagctatacagcgtatctacacctctggaaaggcaatcagtgtcaaccgccatttgaaaccagcctgcccctgtacgtccgctcgagacaacaaagaaacgtactctggtataataatagttaatgccgccccgaccagaagtcccattccacaggtgctaaggattgtgagcctcttgcctaatacaacagatctcctcatgtagtcagtaaatcgcccatatgagcctggcgatacatgaacgcttaccggatatgacatcgaatgcgaggggaaggtaccctactccaaacgaggcagcgaacgtggccacggcctgccccactagggtcaagagcggcatcgctagaataccagcgtctgacggtcgatgttgggcagactatgtcctggagtgattctcagaagattgctggcaggacagatggtctgtgctgaaggtgaaagtatggtagagggggctactccacttgagcacggtcgacgacctcgaatgacgaggacttggcaaacgttcaggtcacacccagagggagggggccgatcgctccaattcaactttcgcttacgccgacacttttccggaaccaaaaatcaccggaatcaaaacgcttcgatggcaactgccggcggacgttggatgagcaagagaattatcaccgtatgtgtgtatcatgattccaacagatgagaaatcgcagagacctatcctagagtttcaatattcgacagcgcttctccttgtatctgcagtcttactggaaagcatcgcttcgccgttatcagacgctcctttcatacgctcaaaggaaagcttcatccccacgcctcgtttgcccgggttgcagcatgactccctcttctccgctcctccttcctggtttgaggccgtcgagcggcacctgttccatgaccgtctcatccgatcgggtccgtaacctgctccccgcctgatcggctagcccaggttgcgcgtacggctgatactgctgctgctgatgatgatgggttgggtgcacatacgtctcgccaggtggtcgaggcaacgcagtctgtttgatctgtccgttgacgagcggggtcctcgaatccgtcaagctgacccgattgttggatccgtcgtattgcccgttgacgcgatcgtcgggccggtagacatcagtatcaggcacgccgccgtgctcaacgtcctttcctgggctgtggtcgtcatcccgagggatacgaggagggtaagggcgatgcgcacaaggatccgtcaaagcctgtagagagtcgatcatgattagtccccggccggtgtgctagtccgtcgagcttgattactgacgggatagtattgacggtaacagtaccaagctacaagaataccgatgatccctccggcaatgacatcactgtgggaattgacacggatgagcctgtgtttaaacatggccaagattatcgttgattccaggctcacgtcgcatggtgtcggtaatccatcgtcctgctgatactgatcaaagccgccgccgagacggggatcaagagcaaccacgacttgagggtgtatcctcgcctgtcccaaattctcatttctaacaggtagcgcggcagttgtgtgagcaggcgattagcacggtatttacctagtcgagacactgttctttgagaaacgcactgccagcggcgaacaatgccaaataccacatcccggcccagccgaaactgctatggcctgaagggaaactcctgaatccgtcttgaagctcgtccgtgcgggtgcagatcgtccagctggtcaatccgaacaaggggtccgaagtgtagtcgtttgggggtgcgcatcgtgcgatgatgtctgggcgaggtcgaccgacggtgatctgcaaggtgatcagacgagagtcgcacgataaatcaacgtggttggatgagtttggggctttgagactgctgccgggctgtgcacaccccacacaccttgacgatattggtaaaagtcgaagtcagacccagggtgagaccaaggcctagagctcctacctgagcatcgaaccagctcttcctcccggcacccgcccaaatgaggatgacaagcagggggaagatcccagcgatgagagcgagcgaccagacagggatcctctcgtgctcggcgtaagggtggcggagggacgtgtcgttgatggagaagaccctgcgatatccgtcaaccttgtctagcgcgtagaagacggcctgatcatcaatgatgcggtgcgtggtgacaagaagcaggagggttgaacattggtgtaagcagtcatccaagtcgaccgaagcagaggttgcggccgctcacccagacgacgatcgtcaacagccaatccagcccgtagcttcgccacagcctcctcctccttcccgctgacatgggttttccccacattgtccgagcggtcggatcgttatgtccgttcacaccttcttgtctcttggcttgaggcaagggatactcgtcgggcgatgtcgtcgcgggtccagcgttgctgcgtttagtccgaaagaacgacatcccgctgtgtacttcggtgttcaggattgggcagtacggatgtgaggaacgtcggttcaaggcgaccagatttcagcagggttctctcgaaagcgattggggatatataggtatagtaatatatatatatctgcaggaagatctataaatggtatgatcggtatgacgatggaatcctccctccctcttgctagcatcgactgatcatgacagatgacagaatgaaaggagagtcattcgatcatcccgaagagatcgcacggaattcgacaatcgtttgcccttcgctcgtgtgacccgacccgccactagctagctttgatggggaaaagcctccgcggaccatcaagccaagaggaagatcgagacctttttcacttcgcggagaagagcgattcggggccaagctcaacccaaccgatcatgatcatcggctgcgcggctgcagcacgatagtgtgtgtaccaatcgttccatccgcttgaacaactaaagtacgcaatgtccgcaatgtgaactaccccttctcccgacatctcgccagcaactgggcgagttagtggatcagatcttatgtgcttaccagacggaatgtctaatctgagatggaattcagaagccggaattcagcgccctgatgaggctatcttggtcacttgtgtcgtgcggatcctttcttttctagaagcgcgtcgatgccggcatgagtaacgagatgagcgcttgtgtgacgtaaacgatcggcaacggccaacgcggttcggcatatcttggtcgcaagtcggagagcagagcctggtaaagtttgggtcgtcaccgcgatcggaacaggttcctaagtcgagttcaaggagaataccgactatgtcacccatcgtgacaatcagctcgataattcgccaagaggtaccgatcaagccgattgaatagcctatcctggatcgcacgatgaacgttcaaccagctttccctggtctgacgaggaccctcctgagagctcgacagcgatcatcaccgtcaccgtcatccccttttttaacgagtcgcgctcgaccttatcactatcatccttcagatcaaccggatcgaatcgagtataaatccacaggtttacgtttggcatattcgacaagctctcaatccacctcgcgtttaaacatcgactcgagtcttccgggacggttaagaagcacgagacgatacgctacagatcgacctcgggtggatgacgcaaacaaagctggacgtgccggttcaacctcctctctcggcggcgaacttgacgtccgatcacggacccccgcctccaaaactgacaccaactctaattcacctacgactgaggatcctgtcatacaagacacgctgtccgatggcgaaccttacctacctcccttacctcacgcgcagaccaactacgctcccttcattcgtcgactgctctcccgcttaccccatccttcgaaaacgcccaatcctgatcctggctcccattcgggatcatacggccatggacacgatcatggacctcaccctcatttccggccgaccaaagatcaattgttggcagcgacgacgtccttctggcagcgattgaggatccgatggaagtggttctcaatccgtagctggagaaggttcaacatcgacgattggacagcctttggtagttgggtgttggtgggaaacagtcagtggctcctggagaccaagaaacccgcagcccggaaataaacgtcggatcgctgacgatgacgtattgtattcgaacagcaatctggatcatcatcgggacgactacctttgtgtctgtcctcttgacgaccctcaactcgctttccctgcagacccacgttgcgagattactgtccgattacctgacccgaaacacgggattcaccgtcgtctttgaagagggcatgatcaagccccgatgggcggacggtcgattacgtatgggcggcgtctttgtcagccgaagaccagtggagaggattgagggccccgagggtgaagaagacgaagaggcttggaaagccaggaacaactatacgatgtttgacctgaacatcgaagaggtcgaggtgacattgtctttgccaaagtggtttgacggtaaaggactggtcaacgaggccaaggtcaagggggtcagaggcgtcatcggtaagctcatagcggacctgttcacggtacgatcaaggctgatcttgcaatgtttcagatcgacggcacgtccactgggacacgtcgaaacctcttgtccccgccgattttcgtcacccgagccacacgggcgactttgagctggaaaatttggaaatcgaggatttcctcgtaacggttcatcaacccggcggtcaaagacctttcaacgtgtcaatcttcaacgctcagatcggaccgttcaggaagcgatggatgttctatgacatgctgtctgcagtaggcattactgggcagtacgataactgtctgtttagcttgcacaaaccgcaaaaattgggcacaagcagcgttggcgaaaaggatgaacggatcaaacgattggtgagcggtcaagcaataccccatgcgcctacatcgagtcgtaaaagctgagcacaacatggtccatgcacaggcgcggttccggattgacggacttcccatcgagcacgcccagtatgcaacagggtccaagggacccatgtcgtggatcacatctggcaagctcgatgccgtcttagatatcaagttcccccgtcatcccgatgaagaggtggatttaacggccatcctcaaccatctcggcaagaacgttgcagagattgccaaagaagctggagtgctcggtgatgacaaggcaacgagagattccggggcggatgctagagggtccgctgaagcagcacagagtgcccttatcgcgcaaaggcaggttcaagcagagaccgatatcattcccggtcagcatcgtctcgctcggccagctttgcgagctcctggaaccgagaccagcccggcgggattctgggattggactgccaacatgcaaaaggatctcgaagagcgagaggtcatgattgatatcgatctccgtttccgtgacatcaaggccgcggtgcccctgtacaccaccgatctgagcgtcagcaacaatgcattcatcagacccattgttgcgttcatgaagtgagtaaccgatgggcttgttttctgcatttcatgaggatccgactgacgacgcgtttctcatcaacctagtgccaatcgcacccttattcctatacactgtagcgtcaaggcgccactttcggactttgacggcgcatggactgtaagtcgcctgggtcctcgacacggaccttccccttttatgttttgcgaagctcatacctgttcgttctttttcgcttgatagttgtttgagagtaagccttgaagtcgcatgtgagatacggaggtcacactaacacacgtcactttgctcttgtcccaaccagccggtcttacgctgtccacatcgcaacaggtatgtcgctacctctacacgctgcatcatacctgccgataaactgatgcaccgctcgtttatcagattcacgccgccctcattcaccacgtctcgtcaagccaagccaacaaggaacggatccgtaccgtcggtgcatggggagtacagcgaggtgcagaagccgtcttgaacatggtccgaacggtggtggaccctatccacggccaggcttcgttacccgctcccgcctgagctgcgagcccattacgaccaagcacgaccaatgaactgctcacgaggattgatgatacgagatacaacgacgcccctcactctacatgcgcatattccataatgttcaatcttcctcgctatcgctaccgtatcctccaagcgcgcccatgccagtcttgggtgcggctggctgaccagcccgcttgacctcggcggcttgtttcttcgctagttctgcaaagtacaacaggttgtccaatgcttcgccacccagaatgccattctttttcgtcgtagtcaaggatgctgcgttgcctgcgtcgccatcagtcgttccggtcgcggctgaaccgttttccagcctcaatcgcttgcctgatcgacctgcttcctcatcatcgccgtcttccagagcgatcggatagaagtcttcttctcgtccttcctcgagtgctccgatggcttgaacggcttccaccatgttgccatcgatctggccggcgatggcgaccttgccctgggtttcgatccttcgcttctctgctaccttttgtacggggttggggtcctcggtcgcccatctacaaacgcccaagagcggtattcgatcagcaactgaaaggtcgtagcgcattttattggacttgcctgatgttcaagatttcatccccgtcgagactctggttggacatggcttccttggcgaactgagcctgagcctcgttggagtacgagacaaaggccactcctcggttgtacaggatgttaactacgaaggagtaggtccggggtcagacttctggctccatggtacagacagaatggcaggcaatgcttactcctgacgatatcgccccattcactgaaatgtcttcgaaccatctcttccgtatcctccttactgcccgcctcggtcatacgcccgacatacagcctacgaacatgtcgacgagactattagtgataggtctcctggatcgtcgtcttcatcttcaaagcccgactcacgttcggttctgtctaccgaaactaccgacaccccccatgtcgtctcggtagtcggcgtgcttctccctggcaaagcagtcgagcgaggtgtccgggatctgatgcgtggggagagggagacgatgcaggtatttacattcatgcctaaacatgagagatgaagcgatgggggacgtcagttacgaaccgtatactttggagagggaggtacagtgctcacccgagtgggcaacaacctcgagcaaagaacaagcaacaatactttgtcccgttggcatccgctcgagtgtatccagcgtctcgcagaatcacgcatctagactgagaatgcgttttgctagagagagggaggtgaggaagtttcgcaaaggtacgttcagcgaaactgtactcccaaaagccctgccaagctcgacccggtactcactttccgtagctgtcttcacgatctcctccagcccacttgttgtaccagatatctgagcagcagagaatattcagggcagcgcattaggagagctctatgtcttgctcgcttggtaatctactcactgtactctttgcctgtctgaacctgctccgtcttgtcaatctgatcagctgccacctgtttccttgcgggacggatttttcgcttgggagcgactttgttttgcaaagtcgacatgacctgttatctttctgtttcagtttgctttttctgtttgcacggactggcagcgataccagcctgtgatcctgttagatcagtcttcgataagtaggtaggtgagcaagtcgtgggtacaggcgggggaggtcaacttgagctgagactttgcgttgaccatttgttggtcaaggtggggatcgacccaaacatgtagagtggaaagtcgatcgaccattcatgcgttcaacgattcatgaaacaacatcgtggaattgttcaacttgaacaacctattggagccaacatcgatagagttcataacggcaccaagatttcattcataatacagtcgaggcataacggcaccaagatttaattcataatacagtcgaggcataatgggctacgtgacaagataccccaacgagccggatgagccgttcaccgagttcgacatcgcgcccgaccaggtggaggacaacgagctggacaaacccgtgaacggagtgcatctcgaagtgattatctgccagcagcctacatcgagtttcggcatccgctgaatttcacatcgttcgtctcggcttgggtcctctaggcctctgagatacacggcctgcctccccttgtgctgggttgcgcaacctacagctcggtatacggcgactctccagctacccaggcttctctctatcatcgcatgacccgtttggcgctccgatacggaatcacggcgttcgatacggcacctcactatcacccttccgaaatcatcttgggcaagtgcttgtacgccttgcgggacgagttcccgagggacaagtacagcatcatcaccaagtgcggaaagtatagccccagaaaggaggaccacgtgctggacgaagacatgttaagggcatgcgtgcacaggagtctgaggaggttcatgaccgactacctcgatgtcgtttgtaagtcgggctgtctcgcttttaggtcgtttcggggcgctgaacgctcaaatcgttggcagacattcacgatgccgagttcaactcgtccatcactcctccttccggagatccaacccgggcgcttgacgactcgcccaactatgacaaggaatacgtcgctgcttgcggactcgagccggaaaagaggggccagccgcggggggagggggatgagaagattatcagagctgtcgacgtattgcgggatctgaaagcagcgggcaagatcaagaagattggcatgagtggtaagcgggtatcttcctcgagtgacgccccgccttgatctgacaaacatacccgcagcatacactctgcccactctccttcgactatcgatcatggtcctcgagcagaccggtcaacctctggatatcatccagacatactcgcatgccaatttgcagaacaacaccttgcccgctttcctcccgcattttgaaggcgtcgccaagatcccgatcgtcatgaacgcctcgccgctcaacatggggttgttgaccacggcaggggcaccggactggcacccggctcctcaaggcatgaaggagtgtacgaggagcttggccaaggatatccctgaacgagcgaaagaagagggcttggaggatatcaagatcgaggacttctcggtgtcttttgggatgagggagtttgaggtcaagcaaggccaaggggaggttactacgaggtcattgcccgtagtcgtaggggtcacttcgctggaacaggtgagaaggtttcgctcgtcgagcatatcgagctcgtcctaacagcactttgacgaccgttcagattcataccgccgtcaagtctttcctcgccgtcaggcaaccttctgacgagcagcgagatgaaaagatgcgaaagctcgaggccgaggcgaggaaaaagatccaggctggcggatgggcggattggagttgggagtcataaaggcgccgagccgcttggagacagctaaaacgagagaccaagaatcagtttgtaagggatcgatcgagtcattttgggtttatcaggcatgaagcaatggcgaatttctcaagatggtgaaacgagacttgacttggtcgagtcgactcgatcgatgagttgcgactagtacgactcgttactgccgaggttcaggctcgacacaagcgaaagatcgctaatgattctgattgagtactctatacaacaggatgtatgcgcgcatgctgtggcgcaggtcgtttcgtataacatctaggctcgatcccgggaaccagaggtcccacgaggtccactctactccatagcaacatcctcggcttcttcgccagcgttgttcgatggttcggctcttcggagaccggggggaagcggtgcctgcatgtctgggcctctcgattggtccagcggctttgcattttctaccagccattcttccgatgcccagactgctcgtaatcgatgagaatcgaaaccagccaggatgagatggcaaatccgggaaggaaaaggtagacaacaggacgagacgaaggtgtagatcgtgttcagcttcaagcggctgtgcgatcggaccatttattatcaacttacccgctctgtcacctctcataccagctgcaccagcagccttgttatcgggtttggcgatattgaccttgaggtatttgcccctgccttgacggcctggtaattcgttgaaatcatagttgtcgatcgcgtcctgcgcatccatggctgatgaaaaggtgatgaacgcaaaacctcgatgtttagattctgcaggacagggattagatgaaaatttcataactcgtatgagacggtcaggctcacggtctcgaggatccactggtactgagatctcgataatgtcgcctgccgtgcaattgataggagtctcagctggactgcaccataaggacaagaccgccgagcttgggtattcaccgaaagtcacgaacgcctgcagcagttcctgctcattcacatcgtccgagaaccccgtcacaaagatggtcttcttccctacgagcagtgcaatcaaatcgttcacgaggttaacgacaagaacccgcgggatcaccggtcggagcgagacgtgcctgctttcaccgttggcgtttcttgcgttgttgtcgagttcatttcggcgggttctgtctaaatctacagcactggacttgataattcgtcagtggcacgatgcgaaccttggcgatggcaatgacctctaacgagtaggtcccatcatatgatcaagtatgctgctcccaacccaacctctacttagactgcctccgcgcttcctcatggcaagcgcgagaaggtcgaggtcgaaggttcgaacaaagtctcgtcttgttcaatactgtatcatcgagcttgacctcatcgccttcatcgagatcgtcaccatcggctcggagtaacatcgctcagacactatacaagcacttcgtactagtcgaccttcaaacaagtagccttcaagaatgtcgcacggagaccacagccgagatccttggtgcgtcatcgaaccggctcggaaaaagtggaagctaagcgtcaactgacactggtctcgtgaatgtccattcgtagtccttgggtcattatcaatgatgcggggtctgctttctgtgagtaaacaagttcaagatgacactcaaatcggtgacgctgacggcttgtggctcaatagcgatgggagccgtaagttataataccgcatggtcgcttgaccgaaagtcgaggtgttcacattctgtcttgcattccaactgtttcgatggattagatgtaagtcagctctcagtatgcggtcgatcgacagggcatcgctcacgatttgctccaaaacagtggtggaggagtaagcactctgtgacctccggtcgatatgaacttcgaccgactcactatcccgcgtccctgttccccccttcgtcccgatagatctggcacggtatcaagggatcccgagcatctcctcgtggtgaacgactagcgggttctctgagcgccatcaaggcccgagcaccagtgttgggaggaaacttcggtatctggggaggtctcttttcgagtttcgactgtgccgtcaaggggtacaggcaaaaggaagatccttggaacgccatcattgccggtttctttacgggtggaaccctggccgctcgatgtgagtcgtctttggctggcgaggcggacggcgggccaagatagctgatcccgatcaatcattttcttcttgcagcgggtcccaaggcagctttcggaggtgcagtgggatgtgccattcttcttggagtgttcgagggtgagtcttcatcggaacgctggacaattcgcgaacacgtctgctaagaaccgtaatactctgtcgatcaggtgtcggtgtcctgatgggccgaatgttcgctcaacccgtacctcaattgcctctcccggaagccggacccgcaccaacagccgccatcaccgcctagacctagaatcctttccgcaccaatcttccccgcatctgttccaaccgagcggtccttccagattcgacctccgatttccttttcgtaatcacccgtatcatgcatcgcgtggccatcgggaaggcatatttgatcctcatgacgagctgtacagtcgtccagcgatgttacaacaagcaatatttgtatcactagagtaggaccgcatgaaacactactatcaccctcggtcgactcgtggcggatggcctgtgggtagggttcaggcgggcacaaacgcactgtgtccacaggctacctggacaaaacttatatgataacgtgcgcgtggccgaaagattgtacaaatcgaaaagagtgaggaacgtgacgaaggaccgggatgtaggattcggttccaccacctcccgaacatgtccatgtcaaggagaagggcggccgtagggaaagcgaaatgcttcgaagagacaatgaagagacccgcacgtatggcggtgggtcgatagccctattcgagcaagaacgacagagtcgctgtaggctccgcgtctaagcggtttggttctgctcgacctgggtctgccactgagattgccaagagaaaagagatgtggtgtcagcgcaaagtgcaaagacgatttgggaaaggagccggtgctgctgggactgaccttggacatcatggtgctagcccggtcggtaaacttgaacttttcgttctcgggaataccagtcagggcggcaatcttcttcatgactgcaaatgggcgtgaatgaacagctaccataagcaatcattcctccgggtcgcaggtgatgttcggaatggagctcacccttgccaatcttggagtactataggatcgcgagaccgaaatcgaggtcagcaaaactcgacgggttcgagatcacccaagcgcgactcactgctaggtaatcgacggtcataccctcgtactgctcgatggaagtgaacaagtcgttgtacccctcaatctcctgtgtacgtcgaccgggacaaagaggtggttgtcaacgtcgtcagcttgtcgtatcccctgtttgcgcccgcgagatagccagactcacctcggtggcgggcatgttcttgcccaagaatccacgctgcagcctgtgtcgccagtccttgacctttttggcctcggggtcgttggcgagcgggtcggctgcgattcgacaagaccacaaggtgaatctcagcccacgtgtcatgatatactcctcgaatcgcaacacgtcaaactcaccctcctcgttctcatcggcagcctcgggttccttgggctcttcgacctttttcttactcgacttgggcttggcggccgactttttcgagacgggctcttcgacagcctcggcctcgtcctcgtcttcgacagtgtccttgctctgagtagaggagaattcggaccggtcagcacgctactgactttcgggccgtgtgtacgtccttgatcgagtgagcgtacctttttagactttgcgagcttttcgagctttgcctttttagccttggtatcggccgctccggaagtcttcttctcgccaccccgcttcctcttctttccggcgctctcctcgggctcttcatcgacctcgtcggcgagctcgtcctcatcctcggctccctccatgtcctcgtcggcatccccagacgctcgaccggccaaccagtccgccggatcctcggcgacctcgtaggcggtgaaaagctcgcccttcttctttttcgagggtgcttggaggtaggcggtgatctcgtgctttttcagggggaccagatccttggcgacggaccatgcgctgtgaggcgtgcaggtcaaagtgtgtcgagaggagggtatgcgaggtcgatcgggattcagagtgacgcgcgtgatgaaaaggattgatcgggtgcgtcagctcggacgcttgtgtgggaaaaacaaaacggtgggtgacacgcgtcacggcccctaaagtacgtgatccggccgacgagcacggaccaccgatccgaactggggtacgtgctccacaatggagtagggtgaaaaagagaggacagatggactcactagtctccagtggggaagaacattgaagcgatctgtcgtccgcccgaaggtttctgacgcatgactttggcagggatctcgtcaccctcgacgatctggtccgggagagtcagaaagcagatgatggatgcgacgaagtcagcgtgcggtcctgaccgggaatgtcgcttattgtgatgagccaagtcgagacttacgatcgaggctgtaatttgcgattcgggtcgattcgaagaaaacgaaagaacaagcgagaagatgacgatcagcaatctcatcccacccgcctgacctttccctcttcccgagcgtcaaatacggaagcctgtcggttctccgggactcacgccaaggagggtaacccttcagtcgggtcaagacgatatctcccttcttgaacgaatgatgactcgcgccgtcgctggcaccgccggccttgccccccgcgctctttcgtcgggaagaagccggggcggcagaagaagctccgttgttgttcgagctcgagtttttggatttaggctttttgctagagacgggtttggcatcgtcctcgtcctcggcagcgtccttgtcctgctcgtcgtcctcggcaacggcggtggtagggacgttgtcatccttttcctcgtcggctttgggagccttgtcgtcctcgacggcagcggcgtccccgttggtctcctttgcatcggcaccctcggctttggtctgctcatcaccggcaggcttgctctcctccgcagaggtcgagggttcgtccgcggcagcagcaccagcagaggcggtggcaggggtagtatccatctgaacgtcctcgacgggagctttggtctcgttatcagacatgatgcagggttgttgcgtgatcagaggcggtgttgtttgctagactagatgagagaagagaggtcgaccggagggagcgttcaagacgtggattatgactgctcaaacgaggaaggtcgaaagcgaggtcaagatggtacgtcagacttttgaacgtgaacgggggcgggcgaagtggaggaagtgtgcttgggtactgaccaattttctcctcgactcgttgctatctgatcgttggctaggtttggtgtgtatgtgtgtatcgtagatttctcgatgagtagtcgatgtcgacgttcgaatgtagtcagttccagcgaggtgaagtgagaagacgcgctttcccgaattgggcaagtcgcgagcgagttcaagcgaggggacaagagagagaggagcgaggcatgggaggagggggaagggtgagatgatcaggtcacgtgattgacaagttgttggatatcctcgtcaggattgaaacctcagaccacaagcaggtaggcaggaatcacaggtgcacaagaaagaagctacaaaggatatatatcgaaatcaatttttgtcgatccagatctcatcgtatgtaccctgatagaaatgaagacaggttgtcgaggtaaaaagcaagacgcgctggagcgtaggggaagcagtcctacgcggcctggtcatcacacagccgccaccgactaccaactcgctctttacaagtcctcatatgcacatcctcttgtctctctcgaagtttgacaagtatatcaaagccgggtgaatcgaaggcataccatagttgatatacttgacgggttctcgcatcaccatgatatcacgtgaaacactttgacaacttgaacgtcacaaacgcgtcacctttctggatgacgaaagcaacggaaacgaagcaaagagcgtgtttcgatctcgatcgtcagcgacagtgctcctataagaaccagctcagcctcgggcgggtaccatttaacgcacgtactttcaccgactcggacacacaaaaacacccaacctcatcaccaccatgtccacctttttccgtacccaacgcgcgctccttgcccgccctggctctctccgcgccgtgagcacgacccctacccgtctctacgcagcggggacgggcaaggtccctaccccgaccatggacacgcccgagaagaaaccggacagtatcagcaactccaactctcctccctctgggtacgctgacgaggcttccaaacgcggacctcctaccccgggtgccaacaggggggagaacaagcaatccccggcgagtaacccggattcaaagtcttcggccaacgattccgtacctagacctgcgaatggagagacccgtacatcttccgactcacccgcggcggcggggaagaaggacctcgggctgggaaagggagaacctatccaacctcctgatccagcaaagggggaggagagcgcgagcgtaggacaacaggagtttgatagcgatgggtctgacaagaggggggatctgggcaagaccgcttgagaccgggcaggaaggtccaaggatacgggtacgatcaagctggtagataaagaccgagtctggcagaatcctcaaagttgacatctcatcgtctctagttggtacgaccggataaagtgaaacaagagggaccgccgatgatcgagataacaaagactgtattcacttggaacgaacgtacgatgtaagatgtaacacgatcatgcaagacatgtcgaccgtgaaccggagctaccaatgagtctctggcgggcgaaaagaagaaacaatagaccgtgtcatgcagggatgtcggaaagtttcgatttccgctctctgtacatgtcgtatgggatacggaacccaacggctatccccttgacgccttccatcaagcaacagtgggaatgagtcttgcgccagggacaagaggggccggtgcaagggttgatctctttgacatgcccattgcgccaagccactcagtcaatacagcctccgcaaacagggatgtggcatgcatatcgagtgagacgtcgtcaccatcttcctggctgatgggttaggaccagagtattccatggcgcaatcgtccgtagagacagtctcgtcacatcccctacgatcgtatcgagcgcagttgtgtgagaaccgcacgctttacgtcttcgcaatgttcgggcatgcctgcaagaactagtaggcctggccctggttgtctgccaaccccgaagcgggtttcgaggaatcgtccttctgccggatacgagtccgaaaaagggcctgtgttggtgctatagtcatcgaacaatggcgcctacggacgcctgcttcatttgtttctcatgtctacgagtctgatccagctagcgatctccacatgagcgtggcacgcagtccggcatggctaaatgactcgcaattaggcaaacttgatcggtttgaaagaagacggggttccagccgtagactcgaccaaccgcccggtcttttgtaaaagtagactgtgctcgcatggtgcaaaggtccccatactcttgcgttaaatcgatctcagctcgactcccttattcgatcgatcgaagaacctgaattgattgtgcgagattgattatcccatgatacgatttcgtaaggcgtttcatcgccaaaatgaacggcgcgttccacattgccatgagcgcgacttgaacaaatgtcttatgcgttatgcgactttaagatttgttatgcttctgctgcgcaagcgaagttcggacgccgagcatgctgggtggtgacgagagggatgattcgcggctgcttttcgtcgcagttcccgtgtaagacgatgatcacccgataattcggctgtgcacgtgttcaagtattgtatggctccccactaatcgtacccctccaaacccttcctcttttcccacccattgtccttcgtgttcgttcgcgatcgcgtcccaccaagggtgatatccgcatcacccccgtccatcggtggctggtgaggcacgccaggttcataagcgggcacgttcatgatctgaatcgcgtcgacgacccatccccgtttctcgacctgttcccacccgtgcttgtcggtccgtattcgaaccgtttcgcgcccgtcttccgccttgtctccatcccgaacgtgacgtctcgagacgctcgattcccgatcgaacgtttcagagagacgttctatccagccgacgacgcataccgcttccccgcgttccaacctgacgggacccaatgtccttggacgtccttgatccatcatcctccctgcattcgagcccggaccgatcctcgaacccgagctctgtggtcgacctgaaccggcaggatacctccctagagcgtattcctgcatcccgtcgaggtctctaggcatgttctggagtgatttccatgggacctcgtccccgtgtgatatcgtcgacgaggagggagctggcgatgtgtggagaggagggtggggcaggtgggaggtgaggatggaacaggataccgcgatccatggagaggaggtcagaagcgctagccacgatgatggtgatttcgatgtcgatgttgatcttgatctcgatggcagtgagctagcgggaccgtccagtatgacgctgggggtatcgggatcgttgagcagcaagatgcctcgatcgggtaggtactagctcggtatcaacaccgcaagtatcagtaccgaccgtttctttgtcctccgatgtcgaggatctcgccggcaagtcgatcggaaaccttacctggagcaccctcccatacaccctgactttgcccacatcctcccgtcgtcctctgttcaactccttatctacttcactccgctcctgaccgcccaagtcttcgtcctcatggtgctcatggacgaccctgacgagctcatccaccgtgatcctcctggtcggcgagggaaggttccgatcgagttcgaactgcgtaggagtgggcagggggaggaggtcgtaccccgtcgacaacgatgtcggtaagtctgtcgtccggctcgtcataacaagggttaccgaaaggcgaggaaagtgtgcaagtcaggatacagagagagaggacgagaggataagacgcggggtcggggcggtgctggcgtgtggtgtagcgtagtgtactcggctggacaatctcaggacgacgtttcggttgacgaggtccggtctgctcgactttcaaaacaaacactctcgggccgtgatgaaccgagaattgataagatgcagaggcgacgatcccatgtttcttatttccacctcctccttgaggctcggtgtatttctacctgttatctggttatttccaccctcattctccctttgcgcggcggtttggcacggaactacggaccggcgaaaggcagggccgatcgaacggagatgagaagggaggggtgacgtgtttggcaaggcgaggccaccactccgacgacgtggggataggctggtgattcccgcccaaccagtagtgggtgcgtgaactgacctcgactcgttaaaaagcccattgaccggaacgtgaggatgatgcgatggcgatatggcgacgaagatgatgatgacgatgtgtaccctgcagctagcagctgattcgcggttggcagttgggctcggtacaccgaggtggattggctcgaggaggaggctcggaagactcggcccgtccctgggcgaaaaaaaaggggctggttgtgagaaacacagagatccaatgacgacggatgtttctcggctcagtgagttagcatggctggagagattacgaacggttgatccgcgcaatcagcgtgggcgggcggcgacgacgacgacggcgtaggagggagaggacggaaacagtgatccatcaatcattcgagccagccagcgagcgagtattctattgcattccatcatctcatccgtgtccgtcccatgccacgccccccctccccgttgtggtgagtccccagacggagcgtagatcgactcggggggctgataccttgacgaatcggtcggtgatatccaggtgatgacgcgcaggtcttgctgtacgattgcacacaaccgctaccttaccctcaatcgtcatccaacccttcatccgccgcctcgtcgccttccaatttcacacccccaccagcgggcaaatcgggcgcggcctcgggcgaggccacgaggaaatcgtccacgcagcaacacctgtaccctaccaaatcgggcacgagcactcccggagcgacgggttccaactcccgcgccgtctcccgtggcggggcctcttcatccacctcggctccggtcgtcccgaaacgataccccgtcagggcgtggaacaaccagctggacgggttcttgtcctcgtcccaggtcgggagcgccgagttgaacaatctcgcttggggcgtcgaggggcaggcgggggagggagtgtggttgggcgtcgtcggtgggaggaggttgagttgtctgaggttttgagacgacggggcattacgtgggtgaatggtcattgggtttattctgtttaattaaagagtttgagtttgtctgtttcatgtcgatgtagtcgcttgctcgtcgatcatgacgtcgtcgccggtatcgttccgatttctctctctccccaattttgcttccgtgactcgtcgctttcgtggattcgtcgcagttctcaccttggcacaacgaatgaaatgtgatcatatcatccatgtcgttgataacggtcaatgattctagacgaggtcaacgttcagagctcgacttgctgagtctcggatagtcaaggcaaaatgtcttccggaacagatcaagttccaggtaagccagtcatcatcttcctgaacggcgaacgtgctaccccttgcatacgaacaaccagctcacacgcaccgcatcactgcctttccacacagtcaagatcctcttgatcactgtattccaatccatcatccaagtcgtcatcttatgtgcagctgggtacatcctcgcccgcgccgggatcttggataagcccacgcagaggaaattgaacgtcgtcaatggtcagtcctcacacgctcgggatgcgcagcacgaggtcatcctttgaccacgcatcgagcgtcattttgtcgacgactcatcaagcagacgggctgacattgactctgtatttgttccggttgcagtttctctcatgaccccggccttgttgttcagcaaggtcgccttctcgttgaccccgtccaagctcaaagaaatgtggatcatcccgctcgggcaagtccatatcctacccctcgtcctctagcaagaaacccacagcgctaatccctctctcctcgtattctcgcatccgcctacccgcctttgtttctcatcgctcccaactcgattcgatcctcgcaggtttgtcatcgtcaccctcgtctcggccggtgtggcctttggactggggaccgtctttcgtctgaaaaagagtcaacgggcgtttgccatgtgtgcgagcatgttccagaatagtaacagtctgcccatcgctctcatccaggtgagcgtctcgatgatgggttcccttcatcgacaagaggcaggctgacggagaacgagtttatgtcggttttttttgctcagtctttggtcatcgaggtaccagggttgaaatgggggaatgatgataccaaggacgccatgcttggtcgagcattggcttatcttgttgtatactctactctaggaatgatggtaagtcccgaccgtggtcgctcgtcgatacccacccacgaagaccgatgtcaatggaaacgttgacgtcttgcattccgctctcccgccgactcagctacgatggtcgtacggtgtcaagctcctctcgagcgccgacgaggaacaggccgacgtcactacggaacaagtcaccggcgcgatcctcacagaagaacctcaaacgttggaccagcccgggagcgatcaacctcaccctgcagcgagggagacggatcccttgttctcgagcgtcgatcgcatcaaggccgacgaacgggaagagacggccagtaggtcctccgcggatgggtggaaacccagcgcaggctcccccagattgaacgggagcgggagcgggaacggtgctttgcccatctcggcccataccctcgagacggtccgagaaggtcgtcgttcgagccctagtccggacgccaggagtatttcgttcggcgcggccaacaacggcacacgaacgggatcgcgaccttacccccgtcgacctagtcaaatgagtcgggccgagagtgggcgagagtttttgggactgcccgaggctggacagagccgggcggatcagaaacgatacgggccgaacgggaccctgcatgatcatctcgagtcatgtggggacacggacgatagcgacgacgaagagtcggaggacgaagaatgggtgagtcgggccggcgcgagaggtcgacgagagggcgcgagaggtcttgggctgaaccgctcgcatttgatacgcagggcgaccgaaatcttccttacacccgtcgtcgtcaaacctcggctccatcgcatacccgtctcggctcgttctggcgtcggacgaaacaccacgccagaacctttctccgcaagctcaacgagtttcttaccgttcccatgtacagcgccttgttgtccatctttatcgcgttgatcccgcccttgcagcggttgctgaacgaggcgaagccattgacccaggccatcaagagcgccggacagtgttcgagtaggtgtcctgggatccccgtcgtcgagcaagcagcactgacccccacatcgattcgcctgcgacagtccccttgacactggtcgtcctcggggcgttcttttacaaccctcccgcccccgccggcgctacgggcgtatccacctcgaacaagaaatccgactcgaccgcgaacggcaacggtggcaactttttgcaacgcaagatggacgcgatcaagcacccccgtgcgagctcgacccatccaggtgagaacaggaccgtctttgtggccgtgatcagtcggatggtcttggtccccgcgatcctgttgcctggagtggccctcgtcgccaggtacgattcgttcgaggccgccgcggatcccgtgtttgtggtgagtccggctagtcgtttgggctgtcgactcgaaagcggcgacgagcgctgacgtggtgatggaatccgttcattccagctcgcggccgtcttgatcatctcatcggcaagtcctatacacacgatcatacctaatcgaccgccaccccgtatactgatgaccctcgattgcttgtcgtaacagcccccagctttgacgctggctcagatcacgcaggccgcttcgggcgacgcgtttgaacgtctgatctccaagaccatctcgtggagttatgccatcctgacgccgccattgacgttggtgtacgtcgtgctcggcttgttgtttggtcgattgtgagcgggtcggcgtcatcgcattacggatgacctcaaggaggtcgaaaacgcgcgaggcgattcgcttgctcttcccaatccatccttccatccatctcgttctcattcgtcttacacacgagccattattcaaggaagctttgtatgttgctcctaaatcgtagcgattccttctggctacgacatatattcacataccgatacccggcgaaggtcgttgtcgtcgtcgtcgttcctctgccccgtggggttcggttgttgcttgcttgcttgcttgctccgatcttactccccttgcctgtcggtcgtcggtcggtcgatcggccatgtcgtgtcatgacattgacaagtgtttaaccgctcaacagaagtgagagagcagggtgtaggagcaagaggcaagtgaacagagaacaagaggcaaagtagccgagcgatgtctgtagtagagtgtggcatggcaggaggcggcgtaggcgtcattgtcatcccaaccgctcaggtggttgatacaactagtgtgtactaggtctgtagctgtgccacatgctctaaaatctttcaatcaccatcatacacatcatcttcctgtcaccacacccatactctcatctccaacatacttcgaccacctcaccctgctagacccgaccaaacagtccagactgccctccggaacctttacatcccctcggacgaaaccctaaacctgggatggacatcgaacgtacaccgtatccaattctacgagaaactctagatcagtatcagcaccagcgtcaggagcaaaagcaggaagaccgacaccaagtccgccgacaggagcagcatcttttatattggatatagcctcggttgagcaggttcaacgacgatcaaaaactttctaccaccaccaccaccacctgcgtccattgagctaccgaggtagatttcgatcactcttgtccacgtctcggcgcacatcgaggagactagcgacattgacgactctcgctaccgatcacatcgtcaaggtctacgcctaccatgccctcttttaccgctcctatgggccacgtatcacacagcttggaccggctgcatcaacgtcctgaaaacgtgcgacgagattcgtccctcttgagtctcggcagtgggagcacccatcatgctcccatccagccgccccatttccctcaagaaccctcgagctcttcccgtaatcgatcccgatcgcctagcaagatctcgcacaagggacatgtgaagctacatgtcgccgagacggtcgtcctcgtccatccgccagagaccaagctcgaggtcctgggtgaaggggtcgtccaccaagtctcgcagccgcaggaggataccgtgctcaacggtcaactcgaggtcatcatggataaaccccgggtggcacgttccatccgggtcgaactcgtcgtcagttgtcgactccagatacccggtgagaaccactggcacgaccgggaaatctttacgcggtgcgtcgagattggcaacgtcgacgacggcgaggacgagagtcaggggatcaagttggaaaaaggtagccagaggttcgaattcagcatcatcgtccccgcgacgttggccacgtacgatcgacacccgttgggacggatcttgcccgtcatccgggccacggtagaagggttccccgtacagtcctcgcaccatcatcatccgtcgttcaatctgttctctgggatgggaatgggtatgggcatgggcatgggaatcgggaaacaacgggattctcggagtcggaatcgaagtcgaccgtcgagccgaccgtccagtcgagctccatcacccaacagggtcccgaggaacggctcgagctcgggactccctcggaacgggtcgagtagcaacttgatgaacctccccaggactggatcgacctcacactttaggcaagacctgttcgacgcttccacctggacggcagtgtcgaccacgtcgagcccgctcacctcgcccgggttggagcctcccgaattcgagacgggcgacgtggcgttcccgctacccaccccgaccgagctgaaaccgctcaaggggcaactgtttgccgaaaagatcctcgtcgtcgcgagtaacccgaacagcacggatggggaagggttgaccagcctcagcttgcaaaagacgggtaggctcgcaggcgtcggggattggcaattgagcttgacaagcgatgccgtgagttcgagtcggtgcccgtcagaccgtctgtcagaagctgatcgctcgtcgtcgtcgtcgtcgtcgttgtcatcgtcgatcttcttgctcggcagttctcggtaggatcatacgtcacccaacgcatcgtctttttatcgccatcaccgttcgccaccatctttgccgttcgattgctcctgaaccagacatacagcgtgacggatccgacccactttgatcccaatttcaccccagctcaattggccgaattgacttggcatcagtgccccaagaggtccttcctcgtcagcatggatggggcgattcctcacgtcaagaaaccgagccccgacacgcccgctctctggagaggtagcctggtagggacaggaatgtcgaggacgatcaaggaggcggatatcccgtttgaacaggattacaaattaaagacggggagaaagaggctgccagatgataacaaggctagaccgagcaccatcgaggggtgagtcgaggggccggcctgcgtagacggtttccccagacgtccttcctcaccgctgttcgtccgttgctcttcgtcatagcaccatcacgcctattcgggttcatcacgaaatggtccttcaagtcttcttctctgtcgacggggaggatctgcagggtaatccattggagggcgatgatccatcgggagtgatgagaatgctggttctcaccatgcccacagtcctgccttcggtgagcaggcggtatcgtcgttgttgtagcagaacactctgctaatgttatcgcgcttggcatacacagtgcacatgtacctttgaacgagttacccttccagaatgtgagtcatgctgcatccccctttgccgtcgctatgcctcaacatgaacacactctacagactgtgaagtacaacaacccttcagctttgagaagcccggcgcgtgtgcgtgcggaaactcgatggaagactttgctcgtcgggaagccgttcgatcagccgaggaggacgatgacgatatcaatcagctcgatgtcgatggcatgaccctcgacggccgtccacggggtagacgggcagacagaagaaaggcagagtacgatggctcgcatacgcccacccgggaagacgatcgttcgaattcagtgcacgctcgcaatcattagcatgttgagaaagactcagtgccgtcaaggacacccagaacaactctgcatgcatcagttcaaatcgttgttgtacattcatcgaaaggcgctcatgctttattgatacaatcatcttgagggcatatgctagatagaaggacatgggaggccatggaaggatgctatggagactggtagtgccttgtcgataggtcattgcctagggtagccaattttcgttattggatgcatgcggtgcatcatgctgttcggattcagacacagatgtttcgtttcgattcgtgaggattcgtcattatttcatgtatttgttctgggttataggcagagaagacacatgagcaaatgagcaggcgcacgacgaaatgttgagctgggccgactcaccttggccttcttgatgaaaagcccatcccccttaggaggcggtctacggggaggcggaggcggtgggggtggcggaggtgccatgccaggaggaggaccaggctgaatggacggtggacggaccgtatcctcagcttgtggaggaattgagctcttcgtggatttctccctcggaggggtagtcgcaatcgactttctctttgacggcttgtccgccgagttgttgtttctgcgatcggtagcagccgtggtaccgctgcctgtgtctgatgtctctccagaattttgccgcttacgctttttctggcgtcgcttattggctgcgctcgattcttcgtcgttcggcatttgatcgggtctggagctactgttccctgactccttgtcccgagagggggctggctgctttgacgtcgtacccggcagtcgttgatccgctgctggaagagggttaggattggaagtagcatttcctgggtacgttcccttttgggttgtctgggtcggttgaccgttgggagccataacggttcgagcaggattaatgaacattccggattggtactgtacggacagacagatatcttggtcaggaccggctggtgaaagagcgaaaagcgccctccccctgactaaccttgaccaaaaagccgcgttctcgggcgttaccaacgattgtcctccacttttcgtctgctctttctaaagtggaagcgttcccaacgatgaagagcgagcttttggcacgggtaagagctacgttcattcgcctgacgtccctcaagaaaccaatagagctcaagtgatctccggaacgaactgtcgagaggatgatgatgtctttctcttgaccctgaaatccgtcaatggtcccgaagctaacacgttggatcacagtgagcgtttggtcatgacggccgcgaccgtaaatgtctcacaacgtactcgatatcatcgaacgcctcttcgccaaagttttgcctgaagctgcgcttgagttcgttgaattgctctcgatagggactgatgatgccgatcttgcccagcagcgcatcatggccgccatataggttcttcaagcccctgtacagactgataacagcattcacttccgtcggattcttgagcgattgccgtcccgccttgacttcatgcccttccgtagcgtagaaccggtacgtgccaaatactgtggattgatgccagggtgccttggtcttgatagccatattaggaccatcaagcaactttccgccataaaacacctgcgaaggaagacgcgagatgtcgggatgcatacgatattgaatgctgtttcgaagggagagttaggcggtgagggcaatgagaaccgagagagctgcaggactgaccttagcaaatgcatggcttcgggatgcccttgcaccatcctaacaaagagcgactggttgtaaccaacactttccgcctttgtcgatatgactgtaggtggcagttgctgaggatctgtcgaaacgatatgttattagctacgggttgactaaaatcttgagacagacctgtcacacctacctccgaccagaatgcaccttgtacagccatacttcaacggcaccaaagcgctcggttcaaccgattgcgctgcttcatcgatgatgaccgtctcgaattgaaacgaggcgatcgaatcgtgaccagctcccgccagggttgagcagatgatatcggcgtcttgcagaatcttttcccgtgcttctcgccgagcgccatccagttgtctccccgaatccctcgccgcgtcacgatacttgttcatctccttgctcttcacgatcctctgttgcaccagggtggcaagttccgattcgatctgttgacggcgatccgcgtcatcaccggccatagccagctccgcctgttttgcttctcgtttttgtcggatctcgtcgagcgcaagctctactcgcttgatgtggacatcgttgtcccctcccttggctctgacagagctgactcgtgcttcgatcagcgagtctagggatacgtccttaacagcggcattcatactgctctccgcccccagccggacgatctgcggtacgaccatcttgccgtcagatgtgggcacgccatctttcagtcgtcgagtcacttcgtcgatagccgcgttactcggggcacaaatcagcaacttggcattgacagtcttgccagagccgtgcaaactgatgtgggtaggacgttccgtcatgaatcgtcccgctagaccactgatggttttggtctttccagttccgggaggtccttgaatgagcgcaaaccccttgactcgcatcgaaccgatgattgcctttgcctggggttcgttgacgttgtaagcaatcatggccttttcccatgtgactcgcggtatctcgggtaaagcagtaggcttggcttccagaatcgaagtgaggagttccggctcgtagtacggcagacccttcagcgcggcaaactctcgtgccgcagtgctcatgttcatgtgtttgcgtaattgacaccgggacttgacggataaagacgggctgtctcgggagccatccatccggatatgcagcgtgacgttcctcgcatttctcttgaaagcttgaaccttgataagcaccgttttgccgtcgaacatcaacagacacgtatcgtattcgttgaggtaccacatattcggaatggttccgacgatgctgagttccaaatccacaaagtcgtcggtatgctggcgcgaagcgacttcgacagtcaatctgacgggatcgctcgattcgttcatttcgtttagcgattgatctcgaagttcgcggaagaacaacggcatgtaggttcttgcatattcctgaacgtcgcggaaccttgcaggaatcttgctgggcaggttatcgagaaagtcccgttgcatcggatcccatttcagcatggtcgaccagagcatggtcatgtccggcttgagccgagcctttgtgcgctgagcgttaagacgctggcgctctgctggcgacatctcgggacggctcaaggttgcgagcttggcacgaggtggcaaaacggtcatcttggtcttagcagcggatgctttctgcaacctcttcagagcttcgagaccgccgtcctcctcttcggaatcggaggagctgctagtctccgacggcgtcttggctctgggtgtaggaaggctaggcttcgccagcctttgcacgtttctgtctagaacatcgcggttgagttgcctgaccagagccggtttctcgcggtgttccgcggcaacttcccgcctgatcttgcttaaaagcccacttccccgcaccacgggaatgatgggtttgggcgtaggcttgacaagtggtttggcaatcgagagccctgcctttttgaacatgtccggaagcttctgtccttgggatttttgtaatttccgttgggcttcacgattggcagcagaccgctccatgtcttccagcgtttgcgcatccaggccggcgaggaaatcgtcgccgaaatcatcaaggtcgtcgccaaattcgtccacgtcaatgacaacgggcgacgacgcaggcgttgacttctcggacgggatactagtagaatcgattcggcgcggcatcgctcctttctcagcattctgcataagtttggcgaaagcatcagacttgcttttgctcttgacgggtgcgtgttctttgcttttgctagttggcacggcaatcgagctcgagacgtattcaatgtcgttatcggaatcgttttctggtttcatgaatggtttgatgaggaccgctagttcggccaattcgctgtcgttcagttttgtcttgtgacgcttactccttcgacagaacccgtcgacagtgatgaaggatttcatcaaggcatccgacacggatgaattggatcgagcctttgtcagtcggtcgagcagcgatttgagtagctcgtacgtttgatggagcgtttcgacttcggtcaacctgagccaggagatgagactatcgagcacttgttccagttggacgatcatcctgtctcctaccagtgacagcttgtttggcgcctctatcgctggcgattcccgtgtactgactgccgtgccctgagcggcaccttcgaaagtcctgttttcttcgacgagcaagcgtccaaagatcaatgcgtcctgcatccagtcaaccatctcgctattgtcgtagaatggcgcccacttgggcgttctccgaatgatcacggacaaagcctttgtcatgcaatcccacagcgccgagacctcgtccgacattttgcccttggccgtcctgatttccagaaagaccgggtccctcagaaaggcgagcccgctaccggccccgctctgtctgcagagcacttcgaggatgtcggtgaaacagcgtaccagccaccgagccgactctaccgctgttggcagcgattgagcgtcctggatccatcgttccaagtagtcttgcaacgcgaccatactctgggccgggaaatgtaatagcatggccctgaaacagtcgactcgctcttcgacctgatcaaagatgttctggatcaggccgatgatcgcatcatgtacgtcgtcatcggaacaaagcaagagcctcatgacggcctcggggatcctggccgtatcgaagaacgatttgagagccgatggctgcgaaaccgcgacgaacgtggtcaacttgtctccgaaaccgttcttcatggtcttcatggcgctcgtgatcgaggtgatcgttccggcccatctgccttctggttcccaaaacgccagatcggtataaccccaggcgttccctcgaggcgtcggcaggtggccgaagcgcatcatcccgcgcatcaagataacgatcccgtagatatccctcgatgtcgacgtcgcataagtctttttccaaagttgctccgcgaagaccattttggggaaaaagtcactcgggtccttgcacttgcgttgacgagcatcgagggcttgttgacccatggacgagatgatcctcctgacattgtctccatccgacatgaagaccttgtacaagaagtcgatggcggtgtgtcgcggaacgtcccagtccgctccatccgggtactctttgtggtccagagcaatccccgtgatcgtccccgcatggatctgcagagcgttcaacatgcccgcttgcaagatccggtcgaccttggatttggtcggacccaggtcgataaagacgtttgccaggatctaaacatcgtggaacctggtcagccaacgacgatcgctcatcccttaatatatatctagactcgccttgattcctgcatccatgaccttggcgcgaaacgccgcctcgaaccgtcgatgttgcagcccttccagacaaaagctgacgagcctcgcgagcgactctccgaaggcgcccttgtcggtacttgcggccaccatcccacgaacgtcgagatctctgaccgagacgaggaaatcgatcatccacccaacgaaccattcgggtcgaccaggcaggggctttgatgacgatagcccgcgatgctctgtcgtcacatctagatcgagcatgcgcaggacgtcccctgaagtagagtcctccgagctgtaagtcggatcccaggccgttcgaaggagctcggtgtacaaagcgttttgctgaatgttggccgcgatcgagagcgggaactcgaccgaaggatcagccgaggtccatagcggcgctctgggacaaagacgcagcaccgcggccaggattcgcaacatcaacgcgaatgctaaagaaaggacagtgtgaaggcgggagacgaaatcagtcacgctttgcgagctggtacggggaagagcagaggggcaacgtcgacttgcctggatccgccgagccgaacgatccggcgatggtgacaaccaagttgcccttgcccggcttgagcacgctcttttccaagacgtctgggcccaaacagttgctctcgaggaggaccaggaccgcgcaccatcgatagagactcgacgacctcgactcgtcctctccgatcgtcaacaagggatccgtcttccctggtaccttttgtgtgatcccctggaggtccatcaagccggtccagatggtatccataccgagctcggtccattcttccagccgaactggccgggccgcgcagcctctgatgacctctgccgcccaagcccggatttgtctacgcacgaccgcatcctccttgtcaaagacctgatcagcgagcagactgatatacccgggacaaaggccgaggtgcgccagcttcttgttcttccggacactcgacacgtcgtccttcaggatggcctctttcaatcggtcttgaatctcggggtcccgcaagacgcctacgccatcgtggcgagcaaagagtaattgcaggtaaggcggactgatatccagcagatcgggcttggttgtcgatccatcgggatggggttccgcggcttctagtgcagagaggacctgacggacttgccaggtatcgacggctctctggaaattgacctgcgttgccggaggaaagcggttgatgtatctacgaaaatgtggcaacggaaagaaaaaaggtttccttcgtcagctttcgacgtcgtacggaaacggccatccaacccgtgcccgggttgacgtgggttcgctactgactttgcgagaaacaccgtccgagccctacaaaaccccctcgcgcacccttcacaccgcccgacgagccgttccaacgcttccatccattccccggcaatgttcgtccggttgaaagcgaaaaagtagataaggtacgtagccacctgtttgtaaaccggactggccacatggatacaataccaatgtacctcgtcgtccgagggggagatggggcattgtttcaggtaggtgtggatcgaggtgagcgggtcggtgggtggggtgccctggtccgtttgcctcgtctgtagaaaggtgaccacctccttctccgagatggatggcatgatgagatgtacctcgaagcgacaatcgtcgagggtcttcgtaagcaagctgtagaggaggtcgaccttcgaagtggtgttgacgaggtgcgtgacggcagtcgagctagatagccggatgaagcagcttcgccgggatcatgggcaggggctggggagctgagacagccgtcgtataaatgcagggaagaagcgctatcaccaagtgggttctggttgtattatggttgggtagggttatctatagcacgtctgtactagctgtctgctcaggtgcgagaagcatggaccagattgaaggttgtcgttcgacgacggcgatccgcgatcgagatttgacgcaaagcatcatccacatccatcatatcgtaaacaaaagccaaccccccagtccagttcgactctagcaattcgctagcaaagctatgctatctgacccggggtggacatcatcgactctggacgcacgctcgacatcgcggtacagaaactgatttgactgactctacatcagattcagagcatgtcccgtcctgtctatcggacgatacctcctatagtcactcgacaaacaacagatggctcatcgatgttctactttagctcacccccctcatggtctctttgatttccgtcgttcgagccaaatggaagcgcgcgcaacatcattcaagcgcgacagtcacccaccccgagctcgtacacatcattcatcattcatcttgtcacccactccatcatcgaatctcatcagaaccccatgccatcctgccagtaaccacaccacacgactaaacatccctacatagctgccaagatgtcggatagaggtcgttcaagaactccacgttcgctctcgcgttcccccgtcccgaaaaagacgacgggcgacgacgtctcgatgggatcacgctccccctccccggttgacaaacgggtcaccaaatcgcgccgcgatcgttcgggaagcgatatgagcatcagtcccactcgctctcaaagccgttccagggcacctgcttcgagaaaggaccgcgctcgatcccgctcggtctccaggtcggtatcgaggcgacccagacggtcgcgttcccgaggagagaaacgtgatgggtccaaagtcatcgtcatcagccacctcacccggagcgttcacaagggtcatctggaagagatctttggacactatggaaagatcatcgggatcgatctgcccgtcgtcagaggcggtaagtcgactcggacagttgatgtcgtcatcatcaccatcaccatcaccatcgcagcctacctaaacgttcacctcgctgaccatcgttcattcgactttgcttcgcagccggacacaaccaggggaaagcagctctcgagtactctgaacctcgggaagctggcaaggccgtcgaacacatggacggaggatcgctagatggccagaccctcaaggtcgaaatctctcaccttcccctccccgcaccgggtcgggcagactcgagggatcgaaataccggtacgagtagaggaccggggaggtacgattacgctcaacctggacctgggcggggtggtccgcccccgaggaggttctcgcctggaccgggtccgagacgcgacggtggtggatacggtggaggtgcgagggagaggagcaggagtccgtatggcggacgaggcggccctgtccgtggaggctacggaggtggatacgggagggacgctaatggcccgcaacgaggatctggatacgcgaatggacctcgaggcggtgctggtcctggaggctatgacgacaggcgaggaggttatggcaataggaacggacccggtgcgcctttcaacaacaacgaccgcggtcgattctcagggccggcgtctggacctgccgcacctcgccgaccggacaacagacctcgacgtggtagtcccgatgtaagaagacccgccggtcgtcgctcgcccagccgatcccggtctcgttcccgatcgtactcgcgctcgctctcgccccgaccgagaagacggggaggtcgatcccgctcaccctcctactctcgttcgagatcgaggagcttgtccaggtcgaggtcgtacacccgatccatctcccgatccaggtctcctccgccgaggaagcgcagaaaggtttctcgcagtcccagtcgaagcatcagccgcagccgaagtcccgtaaagaggaagagaaggagcagcgccagtatgagcccgagcaagagcccgctacccgccaagtagctccccatcgttgacggtcatcaagcatgacgaacacaagacccgatcgagaaacgggaaacgaatcccttgacataaaaaagaacgagctcgaccccgtcaaagtcgttttctgcttacgtacgaccaaaagatcgcctcggcgaacgatatatcgatagtgtattcttccttcttccgcctgccccgatctaattacggcctaggtgtaactttgacaaacgatgttgcttcgcccgattgtgttacccatcacaatcatctcgttccgccttatgctcgttccctccttatgcaaataccattatgatgtgcgccacgcatgggctgctcgtactatcgaataatgtgattgcacccggtcgtggcgaggtggattctgaaacgcagacgatgcgtttcggttccttacgcacgtcccattccttgtgagggagggagctgacggtgggatgaatcgaggaaatcatcatcaggatgcgccattccaatccgagtgataggtggggcaagagactcacgaacaagggcgatgtgtttcttaacgtgtggctcttgcagaaactacgtcccggtatgacggtttcataactcaggttcagtcacctcccaggtccccggctcaccggaggggctggattgagctgctggatcgttccccgagctgggtagaatcagctatcaaatcaagtgagggaagcctagagtcgtaaaaaaggaaacagttcggcatgaccatgcacgagcggagacacccctcgttttcatcaagcgctttgataaattggctatgattgcgcgacctttccatcgaaatcaaccgccctcacgcaaaaaatggtacgccgtctgtccaaaatggccaatctgtttcatgtcaagcaagacgcgttatcttcgtgactgtcttgaggatatggtcgagtttacgttgtaatcgatacgcttgaataggttttgactcagactgtcagggtcttccaatcggtcatggtaggccaatctatccgtttcggccggagcgaaacatagctcgcgctgagctttgtatggtgggtcaatctgaaggtctgtgaaaggagcacagttcgcagagaatgcgatggtgcttacaaacgatgatgagatcgctcagagacttgccatatctcttgcaacggattgatgagccgagttgctgcttcgtgggatacggatgtacagagatttagggatgaccgataaatcggcagtagtcagtaccgcttgcgaggtttcttgcttgaccaatattcggcaaagttgacgtgatttctgtatcgcactgataccgtatcacaaggatgatggccggctttgcgctgaacagttgcggcgattacaccccgtcacaaacgcgcgtttcactccgtgatcaatcgagtacggcctaacgtgcttccgccgttccgtcgtggccgctcgtgatccatgaagtcaggaaccggtgcactgtgcagtactgtcccctcaagccatctcaagggtatctcagcttataatgatgtgataacggacgttcctaagcagtcgtgtccgaataccgcgaaaaatttagaatcccccccccccggcccatcccttgcatggtatcgccttgcagcgtgttcttccaggatacgtttgaaagaccggccgtagaatcgagggtaactcaccttcacagctgaaggcggtgccctacgaaataggcaaaatgcttcgtgctatcatcccactaattgcgtatccgttcgtgtcgaagatgcgacgagggccttggtcgattcgtggttcccaagctttgaagatccaactgccttccgtcatgtcttccattgccaaggagataccgcaggattgttagtgtctttgggcttgcgtgggtgtaccagcgactacgttatgtgaaggagagagataccaggaggtcccctgaatgcagctgtaagtctgtgttaaccctccttttccctctgtcggaactcatagtcattgtggcgaggcgctgaatgcagtgggctgtctaggttcgccaggtctcgctgctgtcaccgagcgcaaacagctcccgcttaatccaactagtggcgctcacatctccagctcaccgaaatgggggcgtcagcttcgttgctatctttgcatattctctcttgccttttaaagatattggaaacactcgaaagacgttgcaaatacctctcgcagcaggagaggtgtggatttaccaagaaccaacaattctatactgctgtggtcacttggcgatgctggatccttgggtcagcatcgagctgtcgagctattcagtcctgcgttcgcgatggcatatattgtcgtttcctcgacaaacaagcctcttgcgattccggagtagcctcttaaatcatcgcgacctcttcgatctggatgcacaaacctgtggagtagttagcttcatttgcggccatcttgacccgtaggctgcgtctgatgggacacaattaacctctggcgatgtcccaagccaaccgccataggtcggatcaacctgactgtcctagtagcatcaggttcagtccaaagaccatgacgtagtcaggtctgtggaggtggttttcctagttcctagatcaacgtccaggccatattttccagcaagtggatgggacaccgtgagcgcgtcatggtcttccgtatcgctcgtctctttctggcgagcgttgtggtaatcaccgcaactacggttcagggatcgctcggtccgatagattccgctctctgctagcgtgaaactgttcgaacctgatgcaagcctggtcgactcgacgaccaagtcgcgcactgaaacgcacgtcctcgaacccggccccgaatccgcggtcacggtgacgcccttcaagcatcgcccacacaggcgtcgagcgcagacacttgagacttattgacgaccacgatacaacccacacatgtcggtcagattcggaagaatgtctcgtcttggagcgtctgcgcaatccggatcgtttgggggagggggcatagagaatgggcattttttccaagactcgttccatgaagactagctagggaaatacacgccatcctcccgtgttcaggaacagaggagcgaaaagaagaccgggggggtgaggaatcgttaacggatattttaacgaccaccggtcttgcctcccttcatctgctgcttggagaccttgggggcggtagagccggtgggctgcagcacgagacgagaacgatgtaacaacgggtcagttaacgttcatacaagacgggacacggcggaaacgcaccttgttggccttcttgttggtctccttctccttcttggcctccttggccttggtgatggcggcctgtcgggcagcgtttcggacctcgggcttggcgttacgcttggccaagatggaagcgaggtcggcaccgacgattcctcgctgttgacaaaggaacgtaaaccacgagcgtcagtgaagaactcgcagcgaacctcctaaccgtccgtcccgactcggactgacctggtgcttgacggtcttcctgctcctcttcttggcgacctcctcggtgactcccttcttgtgcatacgacggtatacgacagtccaggcgatctttcgggggttcttcctctggaggaagagggactcggacttggcattgatgaacctgaagacctgggaatcgcgacgggcaatcgatgggaattagccttgttcctatggaacgtctctgtcgtacaggtatcgacacgggtaaacagaggtcttccgatcaaaagtcagagatgcgtttgaacgacatctcggccagaccgaaccagacgtatccgaacccgattccgcgtcgacccaaaaaaatcgagactcaccttggagtcacccctgacgtagatcttacccttggaagggtagatcttctgaccggaaaagttacagagctcgaccttcatctatagttgcggggaggcgccgttcaaggatgaatcagtacgctgacgcaagggcgcgccgaggtgctacgggtggtcgccagccagcaggcagagacggagagaaagagagagagaaagacggtagtttggacgagcgagctgggtggattgcagccgctggcgggttgttggacgaggagaagcgatttgcgaaccgagtccgaggatgtaccggtgcgagtcctccattatgccagatgcagcggtcgcgatgaagacgtgctggaatgctcgtcttggcaccgattggcggtcctgcagatgtcggacatggtgtacacgaggtcatcgtcttgcggttcaggacggcgtctgctatcgacgaccggctttcccctagtctcgtccttttctgatccttcggtatcgtcgtcggtccatcatgtcctcgaccgtccaatctcgacaatgccttttctcgacgattcaccggtcgagtaccggtgggtgtccctgtcgtcccacccgtatgacatctcgtccatccggcttgggccctccgacttgggcatcagacatcgtcgtgcccctcgtccaatcggccagcctcgatacggctccgccattcgacgtcctgatcgttccataatcgccggtcgttcgctccttcgtcagagatccaccctccgttgaaggtccaatcggtccatccgtctttctctctctctctctccatgtcgaagggaaatgacctcgcctgcgctgctgactgaacggcatccccagtacgctcccccccccccgctgttcggtacgcaaagactcaccttggcgggaaagtttgcttgataaacttgttgctggaggaaggagaaagggagatcaggcggagtactgaggtggatatgctcgattctttgctaggacgtttgatctcgattgaccgggtcgaggtgggctagggctacgagctggactgggaatgggactgggactggtagagggaggaggaggaggaggaggaggaggagaggagaggtgggcaacgacgacgagcagcgatgagtgaggagaggaaagcaaggcaaaggggaggaaggaagctgcctggtactaggtgagacggtgacgatccgcggatgacaacgagacgcatacaccccgcgctgagagccctgcgacgaacggtaaagctcgagggtggaggtccactacactacactggagcttgctacacgccccgccccactcgaggaagattcactagctgatagacagacgcgcgagaatgggaagggaaaaagcgcgattcggacttagaattcgatggtgcatacgcgcgcttcatcctgggcggagtgccgagagggatgacgcgaaagggaatctcacgcgcgcggacattgagaatgagtgaggggcgctcaactgtccgtgatttcacattcacggcaccgaagctcagcgagagtgatcgatcgaggtgagggagggaaggtgtcggatgtaaattgattgacgacagcacccatcacaacacgttgacaacaacgttttaccggcggttacatccggggataaacagatctgggatgtacggacgtatcctacaccccgtccaacccgaggtcccgagcgttcaatcatcgtctatccacttgcaaaacgataatcgccttgcttcgtgtgacctacacacctcgtcaaagaacgacacgaccaagatcctgtagaccgtcgataggctagaccctctctttccctgacagctcgagccgcggagccaaggcacggtcacgaccgatcatggccagcatcgtctttgggatcctcaggatcgtgcaacagatcttttgcgcgggaggcaaggatcaagagggtcatcaccagcaagggcagcagcagcaccaacaacaacaaggctcgtatgcccagcatgccgggaataatcagtaccccccgcagtctcagcctgggtatccgggacaacatcaacagcagcatcgtcctcaggggcacggtcagggtcaaggagcatggggccagcagcagcagcaacatcaccagcaacagcaacagggtcatgggtccaagccgcattatcaatatgagggtaaacatacgggtgggatgatcggttcgcaacctcatggacagtaccaagtgagactctctcgtcggcgatcgtgcctcgccttttccctgtatatgaaccatgggacacgccccgctcaccgtatacctcgccccttcctgcctccccttcctccgacaacgacaaacgtcgacaaacgcagaatcaagaccagatcaacgcgaccgattcccattacaccgctctccgatcccaagcccgcaagatcggggaccaggcgcactcgtgtttcgcccgttcgcaagcggcctttcaacgcggggacgggcaagaggctcacgaattgagcgtcgagggcaagaggttgatgcaggaaaaagatcgcgtggacgacgaggccgaagagtggatctataggcgtaggtctcgatcggtgggctatcgggcgctgtgggcgaggcgtggagaggttgacgttgcgtctcgactcgaatcgactcggttcggctcgtctttttgctcgtgttgcagagaacaacctggactccccgccggggacgatcgatctccacggactctacgtcaaagaaggtgagtcgtccgccaacggtctctgcgtgtcgaaaatgatttccccgcgaggctggctgacgaaaggcgacccgctagctatcgaacgagtcgatgctgcactggatcaggccaagcgtaatgacgaggacgagttgaggatcattgtcggtgagacttggccgagcccccagtccccgctcgtcgaacgtcgcgagagctcattccggtcgatcgtttggtgatgtgtctcgataggcaagggtattcattcccaaggccacgtcgccaagatcaaacccgccgtcgaacagatgatggtcaagtgagtctcccgtacctcctccccttccgaacgtggtcatctcccttcccgtctcgcacgagcggatttcgaccgacctgacgtgactgactatcatccggattcggtcgttcgttcgctcccgcaggtacaacctctctgcgcatgtcgacccgagcaatacgggagtgctcatcgtcgacctccggggtagggaaggtgccggtcgatcgagagacgctgggcgggtcgtcgacgagttgggtggcaagggtcaagagtgcgtgatcatgtgagaaagggtggacgatggcggtgggcggtgtcgccctccgggttcacaaggtcaaaaatcagatcaggtgtaggacggtggacttttgaatctcgttgttgtataaaggtggaaatggttttgatcgctagtggaagcatctgcgcacgacacgtccggtaaatctcgtcccggtcacggccctcggtctcggtcacggtcacggtcacggtcgaggcccgtccgtccgtgcatgcgatggagcggtgcgacttggcgctccctcgagatcacctatctatctgcgaccaagagagatgagaggtggggtgacggcgtgtcggcgtgtcggtacctcttgaagaggcgctgggtgtcggcggtcgtgatcgtggtgcgtggtggtggtggtggtggtggtggttgaaatgatgattagcatgatgtatcccggccgacctgccgccgccgggtataccgcgcacagcggggccgaggaggacgacaatgtcacttgtgacgactactgctctagactacaagttacaagctactagatactcctgctgctatgatccactactgatctactcggatgaatctgaccggcgctcgtgtacagtaggtcactttcggttcgtgaggtgcgcagtcgtcggccagctcgccagtcgatcgcacgacgatggcgttgttgtgaagagcgatcgaagtcggaagcggcggcaagtgagttagcatagcgtagtggcggaaagcccccccattcggggaggagccagccattccggaggatacggaaacgagagacgagacagtgaccgggtttggcaaaatacgcgagcgagcgagcggtgcgtcacaacaaggggatcagggacggtgggaaaaagggatctcgatcagatcccagacaaacaggcagacgtcgtcgtcgacgccacctgggcggggctggggcagagtcgtcgtctctttcggggaatcctcgcgttgatgggcggcagctgacgcacaacagagtacagtgtgtgccttgcttccttgcccttttacctttcgctccttttgaccttcagatcccgttccgcagagcttcattcgctctgttcggtttgtcggctcgaatacgtgcaaacgcacgcaagcacgcacgcacggcttcaacggggatactaccgttccaaaccacgtaaaccacgcacagccagccagtcccaccaccaccacaccacccacccacactccctcctacctccctcgacacatcccctaacactcacacaccccccactcactcacaccgagaccaccagcggggcaagagcgcagcccccagcctctttcctgcttcttccgtccctcttccctctcgctcttccctcttccttccccccccctcgttttcagccgttcagaaagggccattcggcaccgcatcaagcacacctgtcaacgtcacactctcaccgaccagccgaacccaagagagaaatcgttcgtcgtcggccctctctctccctctctctctctcttcctcgttcgtcgctacctctacctacctaccgcaaccacctcgggcaatcgcaagcactaccggtaccacttcctttctcctttctcctcctctcctctcctcctcccactcctccctctctcggacgtcggtggtcgcgcaacggagaacgactgtctttcggaccccgggatagagaaggattatggccgggatctataacgtgagtaccgagtgacactagaatctatcgatccgtgccagatagtgtcagtccgcaagtacgaacgtagtggttttagcagcagtgctgcagcagaacggggggctaagacgacgacgacgaccgtcaccgaccgccgaaagacaacgatcgataaaatagtcgagcgaccagcgacgagggaagcataataaaccgggttctgctcgtcccatccggacagatacctcggcgagcgggtgacatttctaaagagaaagatagcgggagacagcgagaaggtggaagaagctcacaagccacaccatcacgtacaccactatcaccatcgacaccatttctaccactacaaccgattcgcagcctgttcgctattcgatcaaaatcgtttcccattccccgttctactcagcctcctctctcgcttctcctcctggaccgtcgttccggattcgggatttcaacgcccgtttcccaccacgctagcacgaaaagagatctgaccgggcatctctctccttttcttcctcttgtcctgcccctttttttctttccatttcctcggcaccttgtttggtcgactccatttgacccgatacctgggttacttccgcctggatctcgaccgaatcatcgtcttttcttgaacaacacatctacgccatcgtcacgcccggctctcttacggctcatcgccctcgttcgtccaatccaccataatacgacacccatacacttgaccccacccacgatcgctctcaatcgaaatggacccggttcaacctgcacctacatctgcgcctgcaccacgacctgctcccgcccgtcgacaacgcgcacctcggtcgccgggcttgtcgaaacgaaacaatccgtctaataatcgtcaactcggtcgacccgccctcgaatctccacctctaccaccgttgacgacgaccgtaccgacgttcaaccctgcgattcgtacgacgacctcgtcgacgaacaacccgcttacgacgtctacactgcctcctcatcctcaacttcatgacgaaaccggcgtcgcgatcgtgaaacgggaatctatccctgaactcgaccgtctcgccgccgccgccgctgccgtctccgcgggcggtgcgacctcgcctttctctacggattacccattcgctcgaccccgaacggccgtcaatcctacgcaacaacaaactcatcaccgcaattcgtctgccgggctcgtcggctggtctgatcgccctccaccgcacaatccgcaaaacacctcggtcgaccgctcacctcgaacacgaaacgtcgactcgtcgtacccttacgaatcactggcgtccccccgtcatcacctacctcccctcgtctcgtcgtcgtcgacctcgatcatggctgccggaccatcctcgtcttcatccaactcgcgcctgtccgtctcgaactctggtcgcggccgtcgtcggtccggacactcgaacgccattatcgacattgatccgatcatcctgcgtgaacgggaacgcatggaaaacgaacggatgcaacgtgaactcgcggtcgatcgcgatcgtcgggttggccctctttccgctgcgtccaacaacaacatcgtcgggctacctcacaataataacgcaccgttacctcctcctccgcattattctcatcaaatcttgccggccgctcgaccatccttgtcaaacgatctcgctcatcccaacaacgccaacgggtcctcgggacatccaccgcatctgccaccccaacctcatccctttggtccgccctcctctggccccggtcgcgcgccactcgacacgttccccctcgacgcttcttcgcgtcgccgatcatcaccctcggtcgaacgcgaattgcgccgtcggacgtcttccttgacgaccaatccaaactcgttcctcgcacagcatcatcgtctgcccaccacttcggccgctcccatcgctcccaacagtaaccccaacgccaacaacctgaacaattcgaacgcgggaccgctagcaggatcctcgtctgcacctccaccaccaccactcaacgcgtatccaggtggcaatcaaccttccgtcatggctctacccccaggatccggtgctaggatcgtagatggtcctccgggatccaatcccggcggtgtccctcccccgggcacggtcctcatcccgtccggcggtcccggaggaccttcagtcgcgggtcatcatccccatcaggttcaatcctcgctccatccggctcacgataacgtagggcacgacaagatgatcatcctcttgggcgaggtcaggtctgaatacgaggccatgcagacggattgcatggtcctgaagggccagcgggacgagtatgagaacaagagtgagtcgtagcgcaacggatgtgccataggacctcgccatgctcataacgggtggcttgacgtcttgctctcgcagtcaatcagcagattcaggagattgcattgatcaggcagagtctgtacgagttggaggctcagcatgccaaaatcaggggagagtgagtggatggcgatcgatcgcaggttcctcgcgtaagaggctgacgacggcgcctcgctcgaccggcatctcgactctgcagatacgactcggagatcaaccgtctgcgaagagaactcgaccacacgcgcgcagcacccagcagtgacggtgctcctcctcccgtacccgccagctcgaacagtgcgagcggcgtgggtaccctgcccagtttcctacccgctcctcctggaggacccttgccacccaaccctgccgaccgagagcgtgagcgtgaacgcgagcgagaacgggaacgagatcgtgagagggagagggaacgcgatcgggagcgggaaagggagcaggatcgcggcagagagagggaaagggaacgggaacgcgagcgggaacgagagcgcgagagagagcgagattcgtacagaggctacgccaagatggatgtggataagcctgccagtgagtttaaaagcgaggggccgaccactcgcacgagctgattcgattccgccgcatcgcagccgagcgagatcgactcccgcctcctaccgccagtggtgccgctacctctaccggacgaccgacaccgaccccggctcccaagtcgccgccagtcatgctatccgagttggacccagagacgatcccgcgagagtttaaaaaggaaggtcagggttggtcggtgttgtggaatcccaagagcaaaaagcagctggacatcaatctcgttcatactttggtccatgagaggtgagcagtaaagctggctcgttgcggctgcaatgtcctcgactaactaactgtcggatccgattgtagtgttgtctgttgtgtgaagttctcgaatgatgggcttttgcttgctacggggtgcaaccgaaccgcccagattttcgataccaagacgggcaacaagacttggtacgcctgatttcctctcgccagtctgaacgaatgaaactgatctttcagacctgttgctcagcgtgctggtcgacgatactgcagcccaagctggtgatctgtatattcgaagcatcacctttagcccggattgcaagtacctggctaccggtgcggaagatcgtcagatcagggtgagcgatgatcccgctctgtctcgcatcgcgtgccgaactgacgatcgtgggttttccttgcagatctgggacatcaagcagaagcgaattcgacacctgctccaagggcatcagcaggaaatctattcactcgagttttctcgtgacggcggattcatcgtttctggttcgggtgacaagagtgcacgaatatgggacatggccaccggcagctgcgtatttgacctgaggatcgaagacttggtccagggggaggtcgggccaatcgatgctggaattacctcggtcgcccgtgagtacatttttcaaacacctgtagccttggttcaatgtgctcatgcaagccctttccttcgatcagtctcacccgactcgagactcgttgctgctggaagtttggacacggtggtccgagtttggagcactgtcaccggtcagcagatcgagcgcctccgtggtcaccaggactctgtgtacaggtgcgcattagctgcacatcggggagatgttcatgcgtctgacgggatttctctcgatttcgcagcgttgccttctcgcccgacggaacttgccttgtctccggatcgctggatcgaagtctgcgcgtttgggatctctcgggcaccaagcgggccgtcgcggcaaaccttaagggaggtcaagttgtgcaggggacgggaacttgcgctcacaccttgagcggtcacaaggttcgtattttattcgttgaacgagatctttgctttggtcaagctgacccgctgccactttggctctcgataggattacgtcttgtcggtcggcgtcacgcccgacggtcaatgggtcgtatctggttcgaaggaccgcagcatccaattctggaacgtggccagtgatcaagctcatctcatgttgcaaggccacaagaattcgggtgagcgaccggagcttcgcatgaacatagccagtccacgacgtgctgatcaattgcgatgcttgtagtcatctccattgaccttgccaagagcggcaacatgttggccagtgggagtggagactgtcacgccaggatttggcaatacaaccagttgtaatctggaggtgatccgcgaatgaacgcggcaaggcactcggcgatgagcgttcttgtaacgcagcggttctccgacacgactcgcttggctccctcatagcttctctattctcgccatggtgggcgacattgtttgtgtaattctgggctcttttttatgttttgtacgagagctgcttttattccatatccaaacgagcgatcgccttgtcgaatgacgtaagcgttcatgtcgtcatcacgcactttctcgaaatctcggtaatggatgatatgatgatatgaggaagatccaacgacatacaggcaatactgtcaagaccccaatacgtcgatagcggcacagcagtcctctcggaatccattaaccttgatcgttaacaatatctgattcgcctcgcgatagattgatgaataccctaatacagactgcccaggcctatgtccggaataccgcccgagcagccttcattccctcatccggacctgcagtcgcctctcggacagccgtgcgaccgcacctttacccccggcagagattcttcagcaatgcgcggactctgagagcacaatatgagcgattcggattcgagaatgcccgaccggcaggacccactggaccaccgggtggagggcggcgtcctggcggcagccaacaccctctcatcctcgcactcaggagacggctaggcgatcgtgggatagtgctatacgggataggacttacgggctgtggagtctactacgtagcccatctggaaagagtaccagagacaggtcgtcttcgattcatcgacacctcgccggaacaggaagccgccatgggtgtgcaagctcaacaagaagtattatcccaatatcaggacgccctgctgtcgccctcgcaccctacgaccaaacgagttcgagaaatcgcacggcgcatcgtcgagggtaacatgcttggtcatatgaaggacagtcatagcttgaagaagctacccaacatcggtctcggttccatattcggaggcggccagtccgaggaagaactgttcggatccggctcggacggagcagagcggttgaattctgctggaaacaaggacgtcgagtgggaagtgagtgtaattgctctgccttaatccttgccggacgaggcgcggtgcaatgctgaacgacacttcgaaggtctatgttgtcaaacaagacgacacgaagaacgcatttgtgctgccgggtggacgtatcttcgttttttccggtatccttcctgtctgcaagaacgatgacgggctggcaagtgtgatgggtcatggtaagcgagatacgaacataatcatcaaccttcactgatgagggcactcgcctctgccagagatcgcgcatcaaggtatgtgagcgagggtgtatccgatcgcaattgcgatactcaccgtcaaattacgacagtcgctcgacactcagcagagagagcttcttccatgaaggtcttctttgtcctggctaccgttttggaagcgcttggtgtagatttcgggataggtagaatgttactcactttcctcatgcagtgagtatttctcgatcgcacggcgttatatgtgcgttgccgacttactgagacggcaaactacccctaggctaccgaactcgcgacagtcagaaagtgaagcggatcggataggcatccgcctcatggcgtaagtcatcgcagcctttcttttggttttggaaacttatacctggggtcgcatcgtaggaaagcgtgttacgaccccagggaatcgaccaagatgtgggaacggatgtcgaaatctgagtctggagggatgaaaggggctatcagcaccgatttcatgtccacccatccggccaacagcaagcgtatcaagcagcttgatgcctggatgcacgaggtgagctagctttatgagtcagaacactgatgatgatgttctgacgtgggcttgtgacaggcgctggatatccgggccgcagcaaattgcggtgatacgcaaaggcagtacgaggcttttagggagaaagtcccgctgggagctactgagagagtctgggcctgagttccttttgtacagtagtttctagtacaccgctacaacttgtcaagcacaacgaacgatccactaagaccaggactgagagaaggttccttgccgcatcaaatccagaattgtcgaggcggacctggagaatacgggcaatttcagcttcgttactcggcaccgcaatggactaataccgcttacatattgcccagaacatcattgccaggggcaaatggcacatcccacgtgttctgtcccagctcgttgccagcgtccgccatgacggaatccggttctaagctctcgaattggtcgaatggtgccgacgcaggccccagagtatcaaaaatgccaaactcggcccggccgtccaagccattagctacgtgatttggtgttccacccaagctgagtccaggagatgctgctgcggagagatcgaaaaagtcctgcgtcgaaagaagggcatttgccgacgctgggttgtcaagaccatccgtaaagtagctgttgagatccggcttattggaccgcaaatctcccggagtagaacggctactttgtctgtcagggatgcccggccggattcgagtctgtgaagacgctagacggcgacgtctcgttggagcgggggaaggggaatgtcggcgttgtacaggacgtaaccaggcgggcgacggtctcgtatcgctggtgaccgtacgtggcgtttctaccggaatgtgacagactgatggcgacggactgggtcagtatcgcttccagggtcgccctcgatgactcgactcacttcggcaaaactcctctatgatatctgcagatctcagtccgcacagatatctgccactgaaccggcggagtaggcccacacatgatcgcaaaccctccgtagctggagcgatcagtcctgaaaattccggagtcttgcagttcaaaaccactgcaacaagggttcgtccagcttgtgccaattgatggattacgtgtaccccgtctacaggagaacagcaaaaagagtgagacgcattccaagcaacggaacacatcaggctcacagtacgtcatcatgcctcgttggctctatatacgtcaagacgaaatttcgatagcgtcagctatggtcacgatgcttgacgatttagtcggcagcttacgatgtgaacgtgattggcacatatggtcaatgcagaatccattgctttccgacagtacattaggtgtcgagcgcgttcttcgtccgtctcggcaggcgcttgcacaaagccagagaatcgatgtcgatagacgatcatccgtaccaagtgctcaagacaatgaagccgctcagcttgagtgattctgattgggtccttactctcgacgcattcaacatcgtagtgccaatgtttaggcaagatcgagacccattcttccagcaacttctcctcttctgcaagggacccagcctgacatcgtctcgaaatcgttgcagccgccttggaaaggaaggatgaggtcgtgaacgtcgaaggcgagacacatgaatcgatgacgccctttcaagcagcacgatcgatcagctggatatcgataggtcaaaacgtacttcgagcgtacctctagcaccacgtgaagccgtatcacagcaacaaatgcactcagccttgtctgatggttcgggggttgctccagaattttctccttggtgagatactcgtcgtcgatctgaagtggctctggcacatcgcaatcacgaaggtgaatgatcggcggtcgcccaaacagtgcggccgattgcttgtcccaactgtgcgagaagcagctttagcggataactcctaactcaagtaactcatagatccgcacctatatatcgaccagaaggttcgctgaacatggaatcgaaataacctaggcgtaagtcgaaggtcacaccttatgcgaggatcctactgaccttgcgcatttcctgctcgatggcattaaagtggtcgtagccctcaacactgcgatgaagtccaccatccaggcagagagtcacgctctccgcaagcaaagagaaagccttgctcaaggtgcctaatccgaaggcgaaaatcgctgccagaaaggcagcctggatcgaatataaggtgggcctatctgcagagggcaagtcgcgtaaccgcttgaacagctcgaaatattgcttgccggccgtgctcggatcgtccgctttggcccgaacccttggatcgtccacatgtctagacgacagtgtgcacaccgccacaacgaagcaagcgaacccaggctcggcccatttttgcggatcagcataatcctatcatcgggcgaagacagcaatggagtcagcgccatttgcatcctgttctgacgagtggactcaccttgaggaagcttggcacatgcaagaacggccagaggagatggcttgtcgagagctgtgatgaaggacccgcgtcaatgacctggttctgatttctcgtaccgcagcaaagcgcttacgtagcatcggacaagcgtgtccatgaggtcgctcggtatgacgttggtgattactcgccaagtcgcttccggattcagcatctgactgggccgaggagcgcggtctgggaaaaacttctcctctttttgcttgtcacctacgaagcctcttacggacgtcgaagccgctttgccattccccacgacgctcttcgtccgaccgcggctttcggttatagactcctctgacgttgagcctgaaggagatcccgagtgagcgatcttaacctccggatcttctggtcggtcgggtggtgccgacaagatatcagcgatctctggttgctgtgctgcacgttccggctgctgctgaagagaattggcggtcaggagatctagaagaggaaatcctgaagttgcacctaatgatggggacgccattgtgagcaatgtctctgggagagcatgttgcgactgacaaagccaatttctcgcgtaccttgccattttgtctgaccgatctcgtctacatagaggtacccgttgctgagattcagaccctccattcccctctcgacatcgttcagggcgtcgagaacgttattatcgtcttgttcggccgtaaagtcctctagcgtcggctggttgaggtcgaaatccccgaatgtcagaccagccattgcattgcccgagtagttgtcggcggatgatgtggcaagaccattatctcgcatcattccgatgctgtagctaccgaggccgacattgcccttatgcagcgcgttcgcattcaggccgttgaagccaccggcagtctggaaattcgggtcatagctcgcgcccccattgctcgctggcctgtcgacaacaaaggccgattgcggaagaccaagattcgccaagttgatgccactattattcatattgagctggttgacttgttccgagctcatgacacctgcaccttgcgcggcgttcgccggaacctgcatcggggtttgtcgccccaagctcgacccctgctgtctgaataggttggcaaattcgggcgcagacgtcccgctattcgcgcccacgacgccttgcatattcgaagacacgtcagttgatggccccggctcggctcctgcggacagctgtccatccagcttattgatcaacgcattatgcacaccaggcggaatgctgcggagcaatgcttccaggttgttgagccgggcctctaaagtcgaagtataggtctcctggctgtcggtgctgccagaaccgctaggtttggtagcccctgttgacttttcaggtgctccagaaggccccttgcggccagctttcggtcgattgacggtagcaggggcaggaacggtactagtggtgctggccggggtatcgacgtcgtctcgctctcgcttcttcatcaacctcctgctaggtgtctcgaaggtacagatgttgccagtctgcttgcacgggccacacggctgctgtgtatcgcactgtttgagtgacggtgtgattcagcgataaaccccatagtacccatacaagctctttcaaacttactctgatctttcgccttctgcatcggtcacaagcatgtgccaatctcaacctcggcttcttcgcggtgtgatcatccccgtcttcaccatcgccttctccaacgatgtgcatttctgcattgggattcgactggtgttgcgttcccggctgtccatcagggagcaaagcatgaccctgattcgtgaagaggtcttcgaacgagccagatttgcttcccaatgcagagatcgattcgacatggccgtcatgcgatacgaaacggctgccgtcttcctcagctttcacccgaggggatgaactcgctgaggtcgaggtgcttccactgttcatggtgagggtatcttgagaacgcaacgcgcacgaaagtccaggtgggcttgtttctcctcactgccgagacagaaggttcagtgcagccttgtggcagtcgaaagacgggacaagacaagctgatgaggggtccacgctttgaccgagtatctatcgcgtgacaacaatccgatggcgaatgggtcggccgacgactgagatgacgagtacaggtcgtggaaccagtattagggtatcgccgaaggaagcatgctatgctactacgctattattaatgtgtccacatgaatcgtttcttactctccagtgatttggctgatcccggtgaatatggaatcgagatgggaggctcaactctgttccctcgggctacaaagaggcagatcaatatcgatcccggtcgcccgaagcaggttgcgtgatcttttgccgcgcgttgataggtggacgaagaggatcatctctgattcaggcaggcaatgctgcaattattattattatatttgttattgaatagtacgtagtacggcctaaatatgcggtacacatatgctgcaggaaccaaataagaccaagttgcgatgtgcaactcatcggatgacaggacccgctcagcattttcaaagtctcggtgtgacattgtgccaagtgtgcgtttcagatcgacacaccatatgtgtctttgctggagcacagtagaccgctatcgcgttctatgatgaggcaagaactctctggaaggaatgccatagattcggtgctaagagagttttcagagagactaaacactgtacataggacgaaaaccgcccctaagctcaatcgaatccgtctgtgactgctgacaactacgctgcgctacgcttatcatatatcagctcgacaaccgtactctagaatactgtactggcgatgtaatgcatatgttagtgagcactagctaaatgcaagtaaggattaccctcgggagataatctgtgctgcagagctgaggtatcggctctgcacgcacgcgatgacatctggggcatttgctactcgacccaaaatcgttcgacaaagcagacgccaagcaagcggcacatggccctcgttgtgaccccgctcagggccctcatataaaatcaacaccgctcctgtaccgatatcgacttagtatgagatgccttgagaattgcttggtcgcaaagtcgcgcgtcaacttgcgcgcgcttctccatcggcatagcatccatgacacatggcatatggcagccgatgggttcattgttcaatagacaccgttgaaaaccatgaattggtggtcacgctgtataatggcaggtgcaattcagcaagtacagttggttctgtctatgtatccgcttagaagcgaaacaagccgtaggcactgattggcaaagttcggtacgtctgaagaaatccacaagcgtgttctgtctcgccgattgtacacaagtgtgagagatagcatctagaaagctcatgtatagcccagcctggttagtctgtacgggtttccgctcgtgaatagcgacgtttctccacctttgcactgcgaaccatccgaacagacttggtgagaacatccacctagcgcttgatcggtcttggctggtgcgtcagcgataccgcgaatagggaccggcagcgtcaagttgcgcagcgcctggatctgtatagcctgcggcgggcacctggtaggagccgcgcgctgtatgtactgtcacaggtttcaagctggttgtcatcgtcgatagtggcgtcttcagcgccgagtctgcgtttcatcatcggatcctggcggagtactgctgtatctgggccacggcgattcaggtgcacgggactatgcagacaattgtgccaagttccttcatatcaaattgctgtctacaattgcacggacaagccccataaaactcgtagggatatacagaacacgtgaatatgacaagttagataccatcctctcggaatggtatcacaaagaaaaagaatcggagcagtagcacatgctccagcatgatttgacggcgggaagtcgatgccgcttccgattatgactgtcggagagaggggtgtgaagtgtcgtcgacaaggaaaacggtgttcaggtggcaattataagattccactgtcgcggagggcgttttgcaagatggtttctttgacggctgcgaagaccaatcgaatctaggaaatgaaaggggacgggttagacctgcagacccagctcgtagaaacagcctcgcttacgttggaagtgtcggtagcttgcgtcaggtgggggtacacgctcagtcgtgctcgattcgtttgcgtgaatcgccagaggatatatttggcggccttgttgatgtcggaaccacctaagatgataagacaacgcaatcagtatcggcaagaggaggataagctgccgtgaagatgcctaccggtgtactctgggaagtatttctcgagaggcgtctttgccaacttcattttgaagacatcgattttgttcaagaataaaatgaccgacgttcgtaggaaccatcgggagttgatgaccgattcgaaaaggactaatgattcttgcattcgattctgatcggccaagcaaaattagcaccgcatttgatacgctgctggcaaaagttgatttacctgaccactctcctccagaagaacctgatcgtattcgctcagtgcgacacaaaagatgatggatgtgaccgcttcgaaacaatgaatccactacaagatcgttggcggtaagacaggtaagtatgcatgacctgctgcccatgaagaaatccggtgcgacttaccttcttcctctcggacctctgcccaccaacgtcgaacatgtggatgctcagctgacccatgttgaacctagtctcggagataccagtcgtcttggtacgcgctcgcaggacatcggcttcatccgggatatagtctggcagcgaaagacgtcgcacgtgggagaaaaagctgattgaataccgtgatcagcatatttaggtctgtcgcagctgtcttaaccatacgagcgactcactaagttgccgagtccatcaggtagaactcgctctgtctgtccatgacactgggaatgattgggtcatgccaaaggctttcgatagcgagcgcaatctctggtggcaagttcttgcctggatcggaatcgatacggtattcaaggatgagatcggcgttgacccggttggcagggtcttcagggtcgacgccgagctttcggcaggcgaggatgatggcttgtgcggaatcaaccaggttcttgtatctgtcggtaaagcaaaggtgtcagctgaccatctcgctgacgatcgatccgaatgtgcaggactcgactcacacaacctgtctaaagttcatcaattcttcccgagagtatccattctgatgaatgatcttcatttgtttgacgatagttgatttaccactctctcctgaacctatgattcggaaagagagtcatgaaactacgcctcagtcacctcgtcgcgagcaagcaacacaccaagcctatcgactgacctagcaggagaatcttgcattccttcttgaattttttgctatcctcttcgatcaacttgtcgatggcgtatgacctgtctctctgtcctcgagcaggctgcgcatctttccctgcaaccgtacctgcagcagctggctgtcctgcggcattggcttgagcccccgattctggcgctgaattgagtgccgaggtaaagtcattgtcggtcatgggattggtctcgagaccgccatcaccggccaagggtcccgagggaaggatcggtgtcgatgtctctccgacagcctgtccagctttctgggtgacggctgatgtctgagtggctggcacagcacctgctgcattgctcatctgcacatcaggtatattggtccggttggcggtcgatggtccagcggaggcgttggcaggtgcggctgcaggccttgaaggctgggcttcgggggaggaaaagcaagaccccataatgtagaaggtggaggttgccagaagaaggtgtcgaagatgtagagaagttagggatttggtagtctctctggttggatctagcaactcaatccaacgccggtgttcgacgagggttgcgacccgatcgggatgtagttagggctcgcagctcggttgacgaagcgtctcgaaatcgatgatcgtgagagatatggctccgctcagaccgatggaacgacagacaattccaatgagatcgaccttgttccggcagacggccactgacttgtcgaaccgcggtgaggcctgagatcgtcggcgaaaactacgatgtggtgaacgagactggttcgatgatttatgctctctcgtcctcgagcgagtttgggaggggcggcctggctcctgcccagattgtgtgggacgaaaggtgatagagcgatctggaactaggtatggctagacggaattgattctaggcgatgcagcctgtctccatcgaggccttgaaagtgaaagtaagagtagtgtaaatagcagaggtgtctctggacgaagtggttccctcgacctgagctgcactggcgtgagtaactggctcgtgggtgtggtcgagcgcggcgagtgccatgagagtgataggagtgggtgggtggtggatggtggtggatgggataggtccatcactaagcacagcgagggcaagagggctagcaagcagggcaaaggcgaagcagcgcagggggaaagcagaggccagaggccgacgacggtgagcaacatgcaacaggctaggcaggcaccggaaaggggagagacggcaagtacgagggggggggtggggtaaggcagagaggcagcgagagagagagaaagaaagccgcgaggtgcgtgagggggcaggaggcgacgcgcacagcaaaatccgacttcgacgatcctgagtataccgcacggaaatgcttgcgctcgacccagttcgatacgtacgctatgcgatcgtcgaaagatgacagtgtttcaaccctcgagagagcagggttcctcatcagtgtcgtcactagctcggcgctgagtaggtgaggtgtaccggtgtatcagcctcgcctagatgttgagtcgtttggaatcgcgtcgcaacgcagcgaagcggtaggcgaggctctttggtaaacggtaccttttggttcatttttgtaccgtcggacaacgcgaatccgcttccgatggttcaccccggtccgatggcttgaacgttcgccttgcagccatctcaaggccctcgccctccaccgattgtcaccgccgtgtcggccctgatgatggcttgaattgagcatcgctgtgccctttcttgcacagcaggcttcattacccagtgatgtccagggacggaggatgaaacaggccattcgcttcggcggcccgttcattaagttcgatgatcacgttatgcgggccgatctcagaagtacggcaacggccgctacggagaggcaagcataatcgagtcagcagatcagcagttcaccagggttcgaggtgttgcaagaccttgtgctgtgcactttcagatattgatgacgaatcgcgctcgccagattgcacgcttgcacgaggaccgggtcggcttctcttctagccggcatggagaaagtctggtattgcgaacgtcttccatctacatagccagcgagctcccaaaaagtatccgaatacaatatcttcaaagcacgtctctcctcaatccatagatcccgaagagtcggcacatcgatggtgttccgggtacgataggcttgccgcgatcgcgacactcacgatcgagttccgtacactcttcagtctgttggtctaggcggtcttgggcgtgtcgcccgcgtttgccccccccccccccccccccccccccccccccaaccagccttccaccttccgtctcccctatgcctcccttccccggcgcagccggacctcctggaggaatgccctttcctcctcctcctggtttccgaccgcctttccctcctatgggtatgcccggtatgccagggatgcccagcccaatgggcgtacctcccttcggacctcccggtggtatgatgggctcaccagcgagcgcaatggcggctccctctgcaccgggaacgacggtgaatgtattgccagctcaagacggagtggtctggccggatgcggatgcgtctcctgtaagtcgatcgtcgcagatgagagcaggtcgcacgcctcctcgctgacctgttgctgtcccgtatcaggccgagaaacgggctcaacagcctcaataccgatattcctctccacctccctctagcgctcctctgcctttccctgatcaaggacaccaacctcctgcgttcgctcagactagcggtatcccatccgcatcaggcgccgctccctctgcatccaacttgcaagacaagtacgcctcgacgcctatccctgaagcacctaccggtgtgccaggtccacacagtaccctgacgtcgctggatggtagtggcgtcgcgcccggagagactgtcgaggtggacgaggatgtgactgcgagtctaaagagaaaagccgaggatgatgccccggtcgtatgagaggatgttggacctatgatttgcgcaatgtcatcgattatgggatactacgtgtacagattgaacttgaccagtattgctatgactgcgccctccttcaccaacgaccaggctctttcttcctcaaaaggcctgtttcgtaggcataaagggctcgcggttgaaattggtggaacgaggcgtcccgatgccgtgtggagttgctggtggattcccgtatcgcgtcgcttgcaattgattgacactgcccgagatgggtcgacctcttgacggtatcggggtgaaagcagtacgaccgtcgtgagcgataggatcgctaccggtgtgtaccacagagtgcgtccggactagaagaacacgaaagctcggtcctcgcatctggttccatttctactcgaagaggaaatggcttaccgagtccaggcgcgttgaactgagtcttcgggggtatccttgacgggggtggcatcaactgggccgatcttgtcgccttattatccggacgggattctctcagattgggggactctccttgatattcgaagtcgctgtggactcgagcatcagcatacgtgtgtgccaagcctacatgcgtcctcttacgtcaaatgttccctcatcctttgcctggattctgccctggtcatatgcctattagcgagaccgccatctgacaggccggtcgatcgagtgtgaagactgtaacgttcggggccagccagacttcttgagccggtgacttgctggacgaacggagtttgtagactgccttccgaatggggtccgatcgtgcgacgcctgccgaacctgaggttcagctcggggtaatctctcgagctcggcgagactcactcgttatcaccgtcaagccttggccgctttctcacttcggtttgccctatcgtcagaggccgaccgaacccgtcgagcttttggccaacttcagcgccattcccctgagcgaacctcctgccttttggttgtcccaagccgtcttgaattcggcgctcggtatcatctatagcatatcgttcggggcgggtcgacggcggcgccagagcaccacctattgatccgctggggagcttaccctgattcaaagatgctaattgtctgcgtaatgtctgaatctcatgtttcgaagcccccaattctctgacgcgaataattagcttgggagcagccggtggcgctcgatcactctgacccactgtctgagtcgacgatcctcctggacgcgcctatttgccgtttccagggcagcctgtcggagagtacctcgatcaaatgatgctcaccggcagttacttgcgaggctcacattctgcacagctacctgttttctcagctcccggatcaccctagccatctctgtcgtttgaaactggtcggagatcgccgatcagatcgactgttccaaggcaccaagtcaccaagaagcggagctgaccccaacggtcctgatagatttctgcagatctcctgtagggatcttgaaccatgcaagtaattcaggatcgagctgtgagcgaggacccgcacggcgttagacaacgtgtcgtcagctcctctgggcgttccccgcgcacctttccgcccaacgcagtggtcgtgaccggagctgcgccgcacaacgtgcacttcttcggttgatctacgagatgggcaccattgtatcaatctttcgctgtcacagcgctcgatatgacagcgcgaaccctctactcacgggtgtgattgtcgcagaggaagtgaccgcacgaggtcatccaaaaccgctcgggagcatccgattgtaaagtttcagcaaagtcgtgattgctgttgaagctggtcagactcggaacacgtggtgactcgatttcaatctgacggaatcactcaccatatggaacatgagacgaattcgaagaaccaagggattgcgtttggatcggaatcctcgctcgaagaaggatcagtgaaggaatcgctgcccggatgaaacgacgacccctgaggtgcaaaagcgcggtgccgtgatgacattgcactacagatcgtcacgggatactttctagaggacaaatggtaagccgtttgaatatcatatgtggcccataccctttcccgcataggtatgaatgatgagtacgattgcgaagcagcttgatgaacccctgctgccctcgaatgcgaagaagtggtttgtttactttgtcgcctgtcgatcgatgatggctgagcctcttgaaaccggagagcaaaaagacgtcgaaaaaaacgagctgcccggattcgaaccggagtcgtttggacgttgagctaatcaaaaccaaaagtgataaccaactacactacagctcgctggatagaggcttttgcttaattatcgtatatatactcaaataatccttgcggtgcgccattctggttcgcctacgtctatcaatccctgacctttatgatactattaggagtctcaagggttgtactaaacacatgacgcaagtttgaatatcagtgcaattcaacagtccatcccagatccttcgagaagccatcgaaggcgagacagcccccgaagaagaacccaacaagggttcgtcgataacaaggtcgctgtctgctttgcctattcattcccattgctgcgacccctaagcacatatgtcgccacgtagctgtgtcattcaatctcactagatccagtacgaatcgataacaattcttgcccatcgacgcgttccatcgaccacgatcgacagtcttcccctgccgacctccagacgcaagcccagacgtagacctggttgtccgcttcatccattcgttcaagtgcgatttcgagtctgcgtatccgtagatgatactgagagtcagagccggtgggagtagccaagtcttgcccgtcctgcgatacccggatcgagccatcacatagatgacattgctgttctagttccttcgggcccgtctttgctgagatcgtccgcgataccatctgggattcgagtaacgtctctagagggcggacaaaggtgacctctaacctcttgaggtccaaactcagtcccagcccgagcatcttggtatacgcttccttgatggtccaaagcgtcaacagatgatgcatcctcttcgcgaaagcggcgctctgggagggatggctatgcatccgtccagacgggacctcggcctgttcactttctgtgagctttgacgggggcgagcaagagggcatggcaaggcaatgtcagtcatcgtgtgagggcggtgaccttgtttcgttgcgctcacgagggactcacctgggccataaggacctcttctaaagctggcaattcgtcggcagcacggtccaacctcatacagtccacaccgacgacaggctgaaccatcgctcttcgatctgatatcgtaggtgaggtgctctcgacggcgaagacgatgagctcgtcatcgtgcgagatgttatagtccaccttgtccttcgagtcatcaagtcctgtcaatctctgtggctcgcccacgtaaagttgttaccagatgagcaatccatcaaccttccccaataacaatgcagggaatctggagagcggatcaagatgctcacgaattccggtttgccagtctcgctcacctggacaagaccgtccaatgcttgtcctccgtaccccgcaccttccttccacctgaacaagagcaaccatccgatcaaggaccgattccgatcttcggttcgtctgtaccgtaagatccgacttcgagcgtaaacgggcagaagggagaggaggagggacgtttgctacgggtcgtcgggtctgcagtagtgagtgacggtccgtagcggtttgatgacgtgcaggtcggggatcgggacgcttaccgtttctgtaggatcgaaggtctcgagtgtggtatagcagatacgcatggtgggctcgccggtaggatagaatgcaaggtctcggtagatagacggtgacagagatagctgaggaggacgagacacgagcgtatggattgatcttcatttccacgaaccgatcgagcaaacatacatgcaacacgacgacaaaaagaggtagaactagatgtgagcaccgtacgggtcgagctgttccaccggaggaccaagaagagtcttgaatccttatgaagaaactacgaactgggatgattaatgctggatatactgcctttctctgcttccaaagaaaatcacatcgccttgtcgctggggtgttttttatacgcaaaactctggccgagcgaagaggggaaatcgagacgggatgagacccaggaactcgtttatctcctctctctctgtcaaagattttgcaactggacgtaggtgacgcaaatatagactggaaggtatcaactgagaaaagaaaaaggtcaagagggggtcgtgtgggtcgatggggacgtggtggatgtgagatgagcattatataggccactggtggtgaggggtctcgaggtggaataggctcttgcatcacgtgaaagtagggagagagagagagagagagagagagagagagagagacattgctggatgatgacagcctcgtacacacgtcacaaagggggatcaattgacaaagttagggtagggtgtacatcgagtgacaggagagagtatcagcctgatctgatccgtgtatagaggtctagctgaagtgcaagctcaagcagaccaggaggtttcggcaggttaaacaccaagcaggtacatcatcttgacacacaccgccttccaccttacgaccccgcaatcccgaggcatgtttcccgtctaagctgtgctctatcatcagactatcctaccgaatacgaggacctgcgatagatcaatcgcaccacgacaaccattctcgtattcggatcagataccatcgcctgaccagagaaccactctcttgaacccgaaccgactaaatgaagaggacactccgacagaaccacccagaatcctcttcccatcataattcattcgcagccaacgtcgcctttcaccccgccgaagactttgcccagtcagactcacctccgcgctcgttcccggtcgatctgaacgacgccgaggaacaggaaagagaacgacgttaccgggcttacgtggggaacggtcgtggaagcactagcaacaattacgacgtcggcgccgacggtgacggtgacgattacgaggacgagaacgcgtaccgacgtggacagcaagggttggatttaccgctctaccatcaaaaggggaacatgcaggcccaagaacagctggataccaggttgggtggcgggcttggggcagagatgtcaaggagacgggtaggagggctacctacgatccctgccagcccgaacgacccggacgctagctacctggatgacgaaaaggcggcgctcatgatggagcacgaccatgcgtcttcttcatacgacgaacaagggaaactgttcggctcgaaagggttcggcgtcggtcctcgtacggggggccgtcgtgggatcccgctgatgacctctcgtcgaccggaaaacattccccagtggatcatgcagcacgaagaaatcttctttactgccctctataccgccctctccctctttacccggctgtacaagatcggagccgccaactatgtggtctgggatgaagcccatttcgggaaattcgggagtcattacatcaaccgcgacttttactttgacgtccacccgcctctcggcaagatgctcgtcggtcttgccgggctcttgagcggttacaggggaggattcgatttcaagagcgggacgccgtacaacgaacacgtgccgtacacgacgatgagagtgttgatggccatgttcggcgtaggcatggtccccgtcgcttggtggaccgcaggcgagttggggtggtctcgacagtcccggcatctcgtcactctctgtgtcttgttcggtaagtgtctgttacgaggagagtcgctctgttcatggcatcgtgtgctgaccgtcatcgcggtgcgatctcgtagacgtcggttggttgtgcatctctcgattcatcttgctcgactcgatgcttctctttttcacattcacgaccattctcggactcgtcaagtttcacaaccagcgtcacgagtaagtcatatacaagggcctgagcagcctgcatttggtgtttcgtactgacatccattcgaccgggtcttggtagcgcgtttggtgacgattggtgggcttggttggtctttacgggattacagattggatgcgtttgcaggcgagttgtcatcttgctcgtttcccctccgagtgagtgctgataggcgatcgacactgcagcgtcaagtgggtcggactctttggtgccaccgcgctggtcgggttgtataccatcgaggatctttggaacaagtttggagacctcagaatgcccaaggtgagccgagggacccgtatcgtgttccgctgtaaactaggacagctgcactgacctggcggacgcctggttactcgcagacgacttatgtccgtcattggctagccagagggctctgtttgattttcatcccattctgcgtgtatgccatgtcgttcaaggcccacttcatgatccttaacaggagtggacctggtgacgctcagatgagctcgctcttccaagctcatcttcgagggaacgattttgcccaatctcccttggagatcgcctacggttcaaagcttacgctcaaaaactatggctacggaggtggtctgttacactcgcacgttcagacctatcccgtgggttccttgcaacagcaagtcacatgctatcactacaaggacgacaacaacaactttcacatctaccctccgtggggaggagcgcctctggatccggacggcgagattcagtacctgaaggacggcgacgtcatgaggatcgtgcacacagccacaaccaggaacattcattcgcacgctctgcctgcgcccatgaccaaggaaaactatgaggtctctgcgtatggcaacctcacggttggcgatcaccacgatcattgggtcgtcgaggtcgtagatgacatgattttgggcaacaagaagaacgtcgacactatccacgcgttgacgacccggatgcggttcaggcatcaggtactgggatgctacctgaaggcagccaatgtacccctgccccagtggggttggaagcagatcgaggtcacctgcgacaagcagaataatcccaaggatgcccacacctggtggaacgtcgagagccattggaacgagagatgtaagcagtctgtcaaggtgtgtgagcatccgagcatgaggctcacccgttgtgcccgcttcgttagtacccgctggcaatgctcaactgtacaagtcgcccttctggaaggacttctggcacctgaatgtcgcaatgatgacttcgaacaacgccctgattcctgaccccgacaaggaggacattttggcgtcgcagccactcgactggccctggttgcatcttggactccgtatgtgtggatggggagataaccagatcaagtactatctgctaggaacacccatcatctggtggggtggcggcatggctctgctcgttgggtgcgcaacactcgtcatctacctgatgcgaatgcagagacagtacaaagattgggcagagggtgagtagtgtccgtggcgcgggatgaactatgggacatgctggctgatgatgttgttgcttcttgtaggcgaatgggatgattggttgtatgtgttcaagcttgcacttggcggatggcttacgcatttcggtgagtggatggctaccgaccgagtacccttcctctcgactgaacatcacgcctgaacacagtgccattcttgatcatgggacgagtgacatacctgcatcattacgtacgtacagattgcttgtcaacgatactcttctattgctcagcgcatttccgcacgttgcagctccctaccctgtggttcgcggtcttgatgatcggacacatgctcgatacctttgtcttccaatcgtccaagcgatcaaatcgggcgaaatggatctggttcggagtctttgccggatccgtctttttgtgcttcatgtggttccgaggcgtagccttcggtatcactggtcccatcaaggaccaccgaggccttcggtggagaaaggttcgtggcgactgctaaaggcgaatcggaaacatgcgaactgattggtctcggctggatttgcttttccccacccgcttagacgtggaacgtaagtagcagtgacatatgaagtgtgcaaatcgctgtctctaaccaatctttctcccatcttctgacgcagatttacgacgaccgggattgatcgattgatgtacatagttcatgactgatggacgattgcatacgagacgtacattcttttcaagagaaattgtcccgccacgaggggatacaacaaagggaggcttgcttcgggtcacacattctttgcttgctgttgctgcgattccgattgatctgtttgttttttcgaaagcacctgttcggcctcggaaggatgagcgggttgaccaggcaattcttcgatcaaggcggaaaaagcattccaaccatgcgattcaggagtatgtctcaatccacgcatgaccgggtgaattcccatcttcaccggattccccttgttaagatcgatcggtgaattgcatggcacgagacccggactcgagttgggcgagttgcctttttcgaacctttccccgacagcaccgtgaggaaggatgagcgtgctaggagtgccaccgtgctggatctggatcatcctcgaaggcgtacccatcgcttgctcgagaacgccaacggttcgcggactgtcagagaacatgatcgctgtaggggaacgtccgtaggtcatggtcggcgtcgctgtccccatggcaccaaacatgggagtcgagacggtgtgcaagaatggtcgccgtgtttgcctgggtccgcaagggatttcgatgacaccctgccgctgcgatgtctgtcgatccgacttgtcagcattcatgtcgtaccggatcatccgtagtcaagtcgaaaggctctcagtcggtacgggtagtctggcggagctctagaaccggaatctgcgcgtctttatggaccctgctgtgggtattagaacttgggccgaagcgatggagaagcagaccttttgagcgatcgcccctccagcccgtccgctggcgaccggaccgtgagccggtatatcgagcgacgagatgaaaggaggtggacggtcctcgtgtgaaataccgtcgccatcgcttagtaccccgataaagcttgctcaaacgaaatggagaacgcggccgtgtgggacgaacgtgctggtcggtactgatcgatatagcgattactgccccgccgatagcccatgacgtgatattattgcttctcgacatctccttcgaccgagtttgccgttttcgatccccctgcagaaacaccctgtagggccagagatgacgtagatgaattccaggcggcgtggtccgataccgagaagctttcttttctgtcgagctggtggtgcgagctcctagctgcttctcgacagttccgggatggcttcatgagcagcaatccgactccctcaggttcgaccgggctgtgcgttatatctttacgcccggccttcgccactgctatcccgccaaattgacctatcgacaccgtcagcatgccgaggtttccatcggaacaactctcaaggagtcgaccgagatatgctcttacgcccccgcctgtctcgtctcataccagacggtaggagcgaaagagccgagtcaaacggcaaaccacttgctcccgagccgggacgacacaagaaggccgtacaggagtagtggcagttctggacgtgactagcggattaaggttcgcttcctgcttcgcgcccggccagacagacggcagggaacagagagaagccgggatctgattatggcagttttcgttcaaagctccaccagcgcgatagcagattgtcctgctaagagatctggatgaaggttgaatgatgcaaacgttcgtgcaaagcggacaggttcgcgtttctgggggactgggatggtcatgccggcagtcgtcgaacaggcgataaccggtcgaacgctggccgagcttatcgagatctcgacaaccagatcgaaccttcactaaacttaaagcttaaaaatgccatcacgtcaagagacgcagaaaatcaaaggacccctcgggtacgagcataatctcgcaccactttgatgaataaaccgctcaaagtgccgggttgacgctccgagatcttttggtcaacgagccgccggaccgggaggaagcttccgacccgcatacctgtaatcatccagatgttccacgtcgtctgggttggtgacggacatatgaccgcctggctgaggcgaaagtctatgcggtctggccagctggtctacacggcccgtcttgaactggtgattgtcgggttgcgggttgatctgttctgatcgctgatcgagatgttttgaaccggacggatgtttcggaacgacccgcttcggttccaattgagctcgtcttaatttcaagaaacagcggctgatgggcctcgcgcccagctcaagatcagaagctcgggcgaggaggcaaaaaagctaatcacgatcgttgcgacgcggctttgaggccaacgcgtccgaggcccaaagcacccggtggtgcctcgatctgggcgacgcgcttatgctccggccttagtgcttgagcttgatcgtggccaggagcgtgactggagcaaaaggaaaattcgccctcgtggcccaaccttggggatcgcatggaaaagggacaaacgggtcgcgtccccctggtcgtggttccttcccccttcgccgtgaattgtgacagtttgaactgtcccggatgcggaaacaaccgaaactagctctctctccttctctcgctggcccgtgtcttccttgttgggattcgggcccttcttcgctgtttgcctgccacctgccacctggctaccgtcgctggacatgctgaacaaaacggtccatcgaacccaactccatatctacctcgatcctatacaaagtcttgcacccttcatcacacctcgcctctatcaaacccctcactccacctttgctctcacaacctccaactcccctcctttctttctcgaacaaaccgcctcatctgtgagtgtcatcaatcaagcgatgtgcttgttgtttgtttttgctcccttcccccttaccctgtcccccatcaatctatcaaaacgtcgttgtcgcttttgatcgatctttttcgctgatcacgttgtcaatcgcttggtccccatccttttttttctttccttacctcgtcgaaatcgcctcctccatataacgctcgtcgaccttgctcgtcgaactatccccttttctgcccctatctcactcactcaacccacaaaaaagcagtcccccacgctcttcccctaaaagccaacacaacactttcttttaaaaacacacatacactccatcacaatggctcctatcgaagttaagaaggtaagtcagctaccgggcgaagccatccagcgatgcgaaaaaggcggattgaggctgattctgaccttttccgctgaactcagatcgtctgcattggtgctgggtaagttttccttgcgtcgattcgcgctggcgagcggccgaaccggaactacgagtttcgctcgcttaccacgtcgttgtcgaattcctgccccattagttacgtcggtggacctacctgcgccgtcgtgtaagtgaaaagttctcggacgcctgcccgcatgtcatgagtgaacacgcctgctaaccccgatcacgtcgatagcgccctcaagtgtcctcacatccaggtcaccatcgtcgacgtcaaccaggcccgtatcgacgcctggaacgaccccgacttcaacttgcccatctacgagcccggtctcgtcgatgtcgtcaagggatgcaggggcaggaacttgttcttctccaccgaggtcgacaagggtatcgccgaggccgacttgatctttgtctcggtcaacacccccaccaaaaagtccggtctcggtgccggtttcgccgccgacttgaactacatcgagttggccacccgaaggatcgccgaggtttcgaccagctccaagatcgtcgtcgagaagtcgaccgtcccctgcaggaccgccgagtgagtctaaaagacgcgtcgcgctgcagcgagagatctcgaatattgaccatttcgccgtcttcgtccttgcgtgctcgaacaggtccatgaggaccatcctcgaggccaacgccaagcctggctgtaggttcgacatcttgtccaaccccgagttcttggccgagggtaccgccatcgaggacctctttgcccctgacagggtcctcatcggatctctccagtcccaggagggtatcgacgcttgcaccgctctcgccaacgtctacgccaactggatccccaaggagaggatcttgaccgtcggactttggtcgtccgagctctccaagttggccgccaacgccatgcttgcccagcgtatctcgtccgtcaacatgctcagtgccatctgtgaggccaccggtgccaacgtcgacgaggtcgcctacgccgtcggaaaggactcgcgtgtcggacccaagttcttgaaggcttccgtcggtttcggaggttcttgtttccagaaggacatgtacgtgctgggtgggcagttgcgccagcatctcgaaacggcagactaaccgagccgtctatttgccacgtacacacagcttgaacttggtctacctcgctcgatcggtgagtcgacccttgtcggaacatgagctatcaagattgcgagactgacgacaaggtctgtctttcgtgtgcagctcaacctcgaggaggtcgctcgatactggtacgccgtcgtcgaggccaacgattaccagaagaacagggtacgtcgggcttgcagcgagatcatgcgaatctatgcgttcgacgtaagctcattccgactcgaccccttgatcaatagtttgccaagaaggtcgtcgacaccttgttcaacaccatcaccggttagtctctcataaacgcgatacttctcgccgagcttgctgactcacatcccgacttggccatccttgcaggcaagaagatcgccgtcctcggattcgctttcaaggccgacactggtgacacccgagagtcgcccgctatcgacctcatcaaccactttttgtccgagcgtgctagggtcaccgtctacgaccccgaagtccaggagtcgcagatcatgctcgacctgaccgactacggttcgaagcccgccgagcccatcaagaaggccgtgaccgtctgcgagagcgctttggaggcctgcaagggtgccgatggtgagcagcatttgctgccaaacaggttttgaggtacaatactgatcgcgagatctacttttcgcgtcgttttccagccatcgtcgtcgtcaccgagtggaaggagttcatcaccttggactggaagtcgatccacgacaccatgaacaagcccgcctttatcttcgacggaaggaacattttgaagcgacaggagctcaaggacattggtttcaaggtgggtcgaaggacgggtctggcaggtgtcagttttgatatggacagctgtgctgacaattccgcgttttgctgtaccttctcgtatcaggtcgtctcgattggaaccggtgaccgtctctagagagatcgaccgaggtctttcgctattcccggcatcatcttgcatcctctcctgatatagagatatcgccctgtcttttacgcacacgttcccatacgatagattcgatcgaccgattcgcgacgctacgcggtcggcgtcgaccaccactcccaccactgccctccctttcctcggtctcgttgctttcctttgtagaatgatgggttttatacataaactattccacaacaacctgctgtttcttcgttgagctgtcgacctgactagagtgaccggtggtcaaggtttcggctagaggaggttatttgttgcgtcgtgtgtgtgtggggtccccggatgctttgactcgtcttgctagcctgcagcctggcctgtagctgctgttgtgcctgccgttgcccgaacgagaacgtgcgtcaagagtagtgggtagtgtgtgtgtgcaacacagggtcatcagggctcgacacactcatccagccacacattgacccttctctcctctcgctcttcagcactcctctagctcctctcctcatcctggcctactcgctgctgccgcaccaaactcgagaccgagaatcagcgcgcccatcactttctctctctctctctctctctctctctctctctctctctctcttcccctctttatccttttccgactctctctctctctctctctctctcctctctcgttcaaacaaacactcgaccccgctcgtcgctatcgaaagttgagcaaagccgtagaaatctcggcttcctaaacggatcgttcaagatcagcgtcaagctgggataacatcgacaggctcgacaatagtctgttccactcgtcgcgaggtactttatagtgaactcagtactgcgccggttcagatcgacataatcaagctacccaaaacgttagcgaggagctttacattaggccagctcgttagcctatgcgcctcggactggaacgcaacgaatatacacgaatagattgctagaagcgacaatcacggggcgactctgcaaaggctgctaagatgaaggtcagccgttgtcgcaccgaggctgttcagacgtctgaaacaagctgatacgatgttcgaatggctccaacgactcagttcggaaagacgatccaggccaggcagattcccggctggggaacatattacctagactacaagtttttgaaaaaggcgagttggctcaccaaacaagtcgaattcgacattgggctcacggtttccgtctccctggaaacgacagatcatcaactcgctcgcatcgcatagaccggcttcagaggcctctttgttggccgtcggcatccgacccagtccatcccggatagaatcgaccaatatcaacccgctcgattctccttctaccaccttgccccggtcgacgagctctgcgtcgaccccgttcctcctctccccagcacttcacgcacagaatccgtctctaggcaaccacctgaatctagatgccggagtacagtcaatcgacctggagccgctccctcctggtgcggaaccgccagcacccggcgagagcgcttcgggtggagtgaacggggtggccagaggacgagatagggagagggacgagagtttcaaggcgcacagggccgtcttcttcttcaagctgggaagagagctggaaaaggtccgtaaaggtggacgagctcgaaaatcgttaaatcgtctcgctcacgcactcgccctgaacccgtctcagatcaatgcgttttacctgacaaaggaacgggatctccggttacgaattctcaccctgctcaacaaccgtaaacgtctgctcctccacctagggtccgcttcgacctcggatccgagcgacttggatgatgtaggtcaaggtatgacgggagccgattcgtcgagaaagggagccgaatgggccaatctagaagaaggatggcggttattcgagagggacctggtcaagctgcaacagtttatcgagatcaacgcgaccgggttcagaaaaatcctgaagaaatgggacaagaggagtaagagcagtaccaaggagctgtacctcgagagacaggtcgaaatccagccttgtttcaaccgagaggtaagccccgcaattcattgattacctgccctcattgctctaatcgagacgacactttcgctcggttcagtgcataacgaaaatggccgacattgtcgcggcgaatttgctcgacctcgaacgtggttcatctcacctcaacatttcgttcttggacgatctaccggaagccctgggtgcggacggactacactttgagcgcgaaccgagctttgacgaccgaccggacctcttgcctgccatcggaatggatgccgtctctgacctggagtacgagctggaacgcacgctcgccgatcagagctcggacagcgtcgccaattggctcaacgctgctcgggaaaggcagagacagcatcctgatgcgacgaggttgatgcggctattgtggcgagccgtcgaggagctcgaacctaggcacctcgacaaggtcctctccaccctccctgtcgactttaactttaccgacaagatcaacgggcgcagtccgctccatgaatcctgcatatctggccgggtcgagctcgttcagatctgtatcgaaaagggagtcccactcgaggctcaggatacctatggtcgaaagcctttgcattacgcggccatgcacgggcatgtcgatatctgtgagacgttgctcaagcatggagtggatgcgaccgccgtcgatatggacggtcagaccccgctcattcagggagtcgtggcgggacatgccgcttgcgtcgacgtcttggtgaaatacgtcggcactcaggtcttggaaacgtccgctatttcaaacgacctcattcccctgtccttggcttgtcaacatgggcggatcgaagtcgctcgtttgctgctcaggaacggagccaaagtcctgcccaattcggaagggttgtatccgcaacacttggccgcgagggctggacacgcagacatctgtcagctattggtacgtgaaggtggagcagatgcaggcggcaaggataggcgggacaagtacaaccagtggacgcccctacaccatgcctgtgtaggcggcacggcaagtcacgcggactgtctcaaggtattgatcgacgccggctgcgacgtgaatgcagaggacgagtatggcaaaactcctggcttctatgctggatggtatggggtaagcgtttcaaagctcgctgtcagccattcgtcgttagctgaccagcattctatgtcacgctagcaaatcgcatgtctggagaatcttttgaaagccggagctgatctcggtcgagccaagacgaccgggacgtcctcgaaagtgcagaatttgggtttcggaagtgccgacgtacagggtactgcttcccccaactctgacggagaggacgatacgatgctggatggcgaagtcgacatgattccttccttgtcattgccacctcccatcattccgtaagtttcacgatgacgatcggaagagacttggatgctaaatgactcgactgtaggctccggatgtacgggcatgacgtgagtggtcgtcttggtgttcggcaacagctcgaatgaggctgatgtgcgtggcattcattttcgctgcagttcttggccaagaaatctcttgtacaggtaaccttaggacatccggtctcccaggcttcctcagatcgacgtgtcttccccgtacggttatacagtcgcacggaagacgacaatctacttgacatgtggtcctccctgaagctcgtcatgacgtcaaagctggacccgaccgatatgcctcacagcgtcgtcttgccgctcgccgatgagcgcgagacgtttggcttccacgtcgaggacttagatcgcttcgctctggagatgtcgctctacccgactttcggatctagagtcatcggacgcgcagtcgtcctgcctgcgacattccgagatatgcacaaatcgcagtcactcgttgtgccactgctggatcatcatctcaaagccatcggagaggtctccttccatgtcgaatgtatccgaccgttcgaaggagcacagctcgaaatcggaggccgagtcgagacttactggaagtccacaactgttgcgcctccagctgccgtcgctcaggatcacgcgcatcagttccagcctcaccgaccgctcagcgtgtcgaccacttctcccagcatgaagtcggcccttcactcgacatcgaagaaggtaccggcacatgaggcggaaaagggcggcttcgtgacggcttcatcgctcgcaggggaatacctgcacctggttgttcagttgacaagggattacgtccctgtcattttctcccaatggctattgccttaccgagggttgactttgggtgtctcggatgtgacggcaaagcagttccaggagctgagctcttccgcaggcaagactgccaagagcgccatcgagaaactcggctcggatgtcacgcccgcgagatggcacgaggctctgaaagacaccctcatgactttggaggaagctctgacggtaggtcgaacgccagtctgtggttaaatgaactcaggctgacataatgctcatctccttccttagattctgcctgcgcatattggtgcaaatctccaaattcgctacgcctctgatggagacatcgtccgcgaggggttgatcaatgtccttgatctcaacaaggttgtcgactctgtcttgcgaaccgtctatgaggccgctcgcaagggctcaaatgcggactcgcagaaacgcagccgacgtatgatctttaccggattcgatgctacggtcagtgatatgtgggaagtacgtgatcagcctccgcttacagtttgacaacatcttcacacagttatgtactcatatccagttgaagcagccgaactttgccgtgttcttcagctcatattgcaatactgagcgaaccagtgattcgctcattcagcaagccccgcacgccgaaggtagtctgagtgtacgagaatcagtcaagctggcaaagggccagaatatgctgggcttagcactcgattgtcggctcttggtacgtcccacggtccttctagcccacagcggacactggctgatcatcgccttatgcggactcaggcggctgttccagctcttgtacagagcgtcaaagacgccgggcttttgctgattgcacttggctctgaggaggcggtaacgtctctgaaacaagctctcggtccccagcagactgtggacggttacatgacccaagggtgcgtgatcagagtccaggacatcgtgttcagaggctaactatgccgcccgcctcctttccacgcgtagcatgctgagcttatccgcctgactgtagaaaaatgcttgcgacgagacgtaattcacgaattgtaatgactagactcagagaggaacgaatccatgccaggaaacagtttggcatatcgctattgaatatacatgtacagcaagcggaatgcaagaaatggccatatgttcagtctcgtccatatccacgtggttttgctggatcccgccggtatttcgagtaactaccgatctcggccggtttgtgccccttgtaaaccatccgatgttgacgggatggcgatgcatcatgttgtggtaaaggataaacctcttcggtgttgggaatatggccttgggtttcagccacatcggccaggttcggcccgcgttgcgaaggcccactggcgttgagatgatcacctcgcgcgtagcctgcctgaataggctctcgcgatctgggccgatgccgttcctcgtggccacgagaggtggaccgtgtgttgccatcgagcctgagactgctcatatccagctcttccgccggattgaggcggtcagatcctgactgtcttcctcgcgagaattccctatttcgtgactggggtttctcagatcggtcaagatcatcatagtgggattgagcgagggtctctgtgcgcgacatcggtgtgtcttgtcgacctcgactactacgcctgaccgtcgatggccgtcgatagacgtcatgttcctccgatcgtgacgaggatcggttccggcccgaaactagtcgaccgatgtcagaaccttcgtagtcgcgccatccgcgctcactagaacgctcgcgatatccaccatggtggcgagcgcagtcacaaggtggcggtggctgaagctctcgctctcgtctccgtgtgcagtcgcagcaaaggtgctgcggctccgggctaggcatgctgtccgggtagatggtgttagcatgggtgaggccgccgcgcccaaccatatccccgtagatgtccatatggttcgatggtccttgaccaggtggaaagacagattggctgctcggatggtaagctctaggcttaccggcggtcgaaagtgaattgtggtgaacaaagggatctgaaatcatctttctatcagaccgtcccaagaggacatattttgcacgagatgcacgatcactttcccaggcaagacttactggccatcccgttcgtcaaaactgctccgggggcgtgacgcgacatcggtgcaatgctttggtgaaacgtctgaactggtgacatgtgttgctgcattgtgggtgcggacatcatgctcatggcttcaaccggatactcgggtagaggagcgtgtgagggaggagcgggtaacacaataggcccttgatgccattttgcaaacggtgctggatacaagttggtaggcattcttttggtcgtgcccagaaaggccacagtatgcttacgctcaggcgaggcaaacgcgaatcgccccgtaagtgtatatcctatatacatattcgaaatatcgaagaattcatgaccgggagtctaacaaagggagacatgacacgcggcttgctttcaccgattctatacaaaggcagtctagtcgcggagagaactgtaattgagtccatgcatcatcaagttcgtataccggtcaatgtcgtgcaatcgtcgcttcactggcaccactcgcgcagtgcattcgttagagaccgctccgtccaggtttcgagcggagttggactggtcgtttcgttttgtcgttgggccaaggggtccacataagccatttttaatagtgcagaacgcgctatgacgttgcgatccttttgagaagcggccgcggccgtagctcgtctgtcgattgcttcgatgttacctcgtaggtcacgaagacgggccaggttgggcacgcgatgggagaccaggtcgacgcctagctctggcgtgacggtgccctctgcttcgcctctgaccgcttggagatagcgtgtttcagaatcatagtttgagcctgtgttctgacggatcatccggcgctcattagtgaagacggcgcccaaggtcgatcgtctcatcaacgggggcatcttgagcgatctaggagttgacgctgagcgtgaacgatctgtttgtgttgacccatagtattcgagcgcaatgtccagtagtttaagattcagcggtccaaattggctgtcgtgaacacccagacccgacagtagacccaggttgaggttgaggacctctggctgattctgcagcatactgtccaatacgatagtcttgcatgtctccgtccacgagaatgagtttctcggctttacttcggttttgccgggagaaccaaaggcagacagaaacccgcggtacatggcgtcgtctgtaaattctgccacaatcgtctcaatattatcaagttcaccaggtctatacgtgctcccggtcaacgaatattgtagatccccatgggcgatctgagcggcatttgcgagaatgctgatcgaccgattgcccttaggatcttctgaatagtcgagattgttcgacttgcgctttacaaatacggtttgcaatcgcaagagaacctctcgttgcaggggcgatccttccacattgatgattggggatgtgtatctgggactgccgccagtaagcagcacagtacgctcaaaggcatcggccaggtagggtgagttggctagtttctggtctagcttgccatcacgactgcgattcgtggatatcatcggcatgaccacggttctgagggtgtcaagatcagctgttgccacgcatcgcggttcgacggcaatggcccatagatgccgccaagcttgaagataggagcggttgtcatccatcgcatggggataacgagggaaaaaggcgatggccatggccgcgatagccaaattcgaccgcccgaaagagtatcgacccgcaccaacatgtatgatcccgatggctgtatgcagtgcggttcgggtgctataaggatgtccgtccacgccgtgcaagcttcgtagcctccggtagacatgtacgtcacccgacccggatacgactagggccagcgcgatgagaagtaacgcaaagccttgacgtaaggcgatcctcttgatcttggtttcgtaagaggtagctgcgacaatcaaatcaggaatggaatgtcacggtcgaaacactgcgagttacttactactgggacccatttgctgaataaacagatcgaaggcagtggcgaccacctgctgtgcatccttgttcatcgtaccagcgaatttgagaccgagagcaaagcaagcgccggcggtgatgtgaaagtacgcaagctcggagatctcgtcgatggttccggtcgatgatttaagattccaggccgccagcacgaagtcggggaattgtgcgttcaaccatgtttgagtcggcctgatctcatcccacatgatcagattatagctcagtgttctgacaatgagcatgtcgggccgaatatgatccagttcaaaggcgttctgtggcgggaggagcaaatttgcgatcccaacttggttggtgcgcaggtacatcagcccgagcgacaggacggctccagcagcggtagtattgacatctcggtgcgttcccaaagaagggtcctggatctcgttttctggtaggtgaagatcaacgaaatatccacgtagtcggttcacgcaatgggtgtcgtgctcgcgatttctcccgccctggccaagcataatcaagccaaatgcgcaagctgaagagaacgcataaagttccttgtattccccttgttcatccaagcctggcaagtcgtaccggccaatttctgtaagcgatatctcagctaggcgatggctgcctgaggcgagatggactaggcctaagccgaaaagcgaggcggactgcaggataggcgatgtgttgagattggcggatcccggaggcaacaaagcgctcacaccggccgagagcattgttgttaagcgacgatcctggctgcctgcgtaggtagctgccatgccaagcaagagtccaaccgagatgtgatcatgccgttgagctagattaggatagagatgccaagtttccaagtttttcaaatgtccagtcaagccgagaccgaacaggaagcccccaaaggctggtgtgggttgttcaggcctattgtagaaaatccaagacgagttgactatatcgctgttccgcttgattgatagtcctgctgccacgccttgatgaaatgccggccaggtcaagctttcaaccttgaactcggggaagatggtagtggttgagggtaacagctgaacgccaacgtttatactgggaatttcgaatcgatccgtatttgaaggttcctttgaatccagtatgaagagtccgtatccgataacctgggaaatagtccgatatcccaggctgtgtacgagagtttggtgctggactagacgctcctcttcgctatatagacaagcagatgagcataggcggagacactttcagagataagaccgtgctttacctcagatgcggcttgtcatcaggtttgaccgggcgagactgcgtggtctgtaacagtgactcgacatcccacaaacgccgatcattcgggaagcgcatatttgacactgagagtttgcggcttttgtgcttggcctgcagaacgtccagtccagttgccgatgacggccttggggtaacttgtgacaagatcgcgtcataatcgaacgtaccctgttgaaactaccaagcatcggtttgagttctatatactggcaagccggaattactctcactgcacactcacagcgccttggtgtggaatcgaccgttgcgtggctaccgatcggtgcccaagatccagctgagctgcaatgtccagcctatcgatcaaggtgtaaacttgcaggggccaggtcatgctgggtgctttgcggcccatccgaatcgtatcccacaacggcagcgcgatactccacggaaggtcgttgatccaatccaccgtgacgccgtggaggaccatggtacgcagcactctgtcggctacctccgggtcgatggatttggtggcgaatgttcgatacaagcaaaggacgaatgtaagatggggcaaggattccgaatgaccgaactccctgctagggacatcgggatccgtatggcgtaagacgagctgttttgggactgaaaactgcctcgtaaccatcatcttgcctagcatctccaaaacatcggccggctccaagagagatgaaggtacaatgtcaggaggtgaggctggtgaaaaattgaaatagatcaacaaaggaaatcatacgggaaagcaatgtgctcacatggggatgctaaatcaacctcggctgccgttggcaactgtctctgccaatagtcgacccaggtcgacaggttgaggtagatggcaagagtcaatatggtaggtaccaattgcagcaacttttcgcgttgactagtcctcaacagatattcctgtgcgactgcatgtagcgcttgtaagacgggcagcgcgaatcggctcgaggtccgtccaaagggagcgcaatcgtggccgttggcgacagcagaccgtggggtacgatcggcatttgtcgctctcaggtcggcgcgcggatctctattggctcgatctcgcagtcgagcccaaggtgatttcggcgcgacttcaggtttgtcttgaaagccaagagacgagaggatagcatccccgacagaacacaacatccctctgtggtcggcttgaggcgaccttaggtgagcgagaacgttcagtttgaaagtcatcatcggatctctaggaagaacttgaccaagagcctggagaatctgattgacatcaacgttgctagaggtgaaattgaggtccaacagcgtttccgaaccgtcgtgcaatgttgctgtgacccgtgagctgaccgggttgctcaagttgcgtatcgacgtgtcctccgacgtcggaaatcgcttattagaatagaccacggatgtagcggtgtaggcttcaacagtagacaggtccactggggcgaatcgaccgtggctggtaatgatcctggcatccccgtcggcaacaatcaagacatcgtggatgcgagcccttgtgcaaataatcggaacggccgcatcggctgtatatttagcgacttccaccgttttccaggcgagctcatcgctgctaggccgttcgagccggaagatgtacagcagcgactgagttgtcgaggctacgtgcacattgaggtgtaccgaattcgcgccgagccgatccgaggcaaaaaccttgactttgccaagggaagtcctgtgcgaacggcgagtggatgtcagtaccacagcaaaggcagcgaacttggtaacctacgaggtgttagggatcgaccatcgttgaatctctgtcatgagcatgtcaggctgtgagcggtctttaggctgatctataccaaagagcatggtggtttctccaacatctaggtcctccagtgccaacttggtttttttgttagcctccttcattccttgagatacccttcgttggtgtggcaacccccggatcagatctgcatctgccttgatccgcgcactgtttgctgtatctccttccaatgtcgccaacggatcaggatttcccgtttccatcgggggattgatcgtttcgggcttgaacgatactcgcctgttgtgggccctgctgagcgatcgggtaccgcctacggagcttcgtttctccgcgacggagcccgaagcgctttcgattcgtcccaatccaggtcgctgttgagattctatgcgcttgacgggtacgtctacttgttctgtcgtcgtagcgctgtcgaggacctgtttagtcccgggtccgtctgagacctctggaccttgctcgttcctataacgcgtccatcgcgagaacacgatctcttcggtcttgtggtcgcagaacacagctagcggcatgtctgcgtcatcggtgagccacagcagctccttttccggatcaagcgcttctatccgtccaggatgcgtgatcggtatgccagtatagctatcggtgcgctgtttctggtcaacaccgtcgatcttgcataccatctgtagctcactcgatggatgcatcaaagtataaagtctgccttcttcgcttcctttgtttcccaggacgtcttctaaccggtccatttccagctcctctaaaaccagctccattgtagcatcaagatccataccacgcgcaatgttcactggaccgagatcgcgattcttggccgagtttgatctttgtaagtctcccgcgttcagcttgcgctgcagaacgatcccaccagaaggcaccgcccagacttcgtccacaggttctggaagcgctacgaccaaatcgtgtcctgaaggatagtagacgtggatccagtcgtctagcaatacgacgaggcatctttgctgtgcttgcggacgcttcatggacttgtctcggccagctcgtcgatccggccttccccatttggcatgctgagacgtatggaacgggccgtacgtttgcggtccctcggtctgctgccaactcgggatctctgaggctgcctcgtccgtaagacctgatgagctttgccctgggcctttttccgtctcttggtcagtgcccagtttcgactgcgtgtctggctcggcttccaatgtgaatcgagcgaacagtgcattcgtaactttctgcttctcttggtgatagctgaacgtcctatagacggtggatccccggctccagacgagcttgctaccaaaccaagcgagctcctcatcgatctggttttgaaagctatcgatggcggaaaaggtcgcgttgtatggcaaaggtagaggggtaactcttgatctgaactcgagtgtatttgttgtcgatgaattgtacgaagggaagatggagcgaatggaggacaataaggtggattccgatgaaccgacattacgttgttgatgatttgataatcgctccagttcttgctcgtatatggccctgccgggagacttggcaggaccgagcaaccgagcctccatgatacttttgtgtgatgtcttggaatctaattgatagatgtgcaaaacagccaaagcatgatcataatcgatctatcgaaatgttacaactgggtctataaagctatggatgatgcatgcacattggcatgctccgccggaatcatcaataacaacctcatcaaatttacttccgaacgacaaacaaacggccctcagcgattgatcatgtcgccacttggatttcaatcggtctcatttctctattcattcatatctgtcgcgaagccattatctccggggccatgtgatccttacaagcaggatgttccctaggcgagtgcagactcgtagcacccagttttcagacggacagtgcaggcggagcgtagaggctcaggcattagttggcagcggcagcggcggcttcgacggcggcctattcgaagggattgtcatacgtcgttcagctcgagaacaaccagagatatcgcatagcatagcgaaaatgctcaccttgagctcggcaggcttggctccggtgacggtcttgatgggctctcccttcttgtaggcgatgaaagtaggcatggccctgataccagcgaattcggagatttcctgcacaacgggataaatagatgagtgaagctcgatcgtaagatttacggacgacgttgactcacaggagcctcgtcgacgtcgaccttgatgaactcgacgccctcggtagcaccggccatcttctcgaagtgaggcgagatcatcttgcaaggtctgttgggcaggatggatgttagttccattacccaactctagcattacgtcaaacgtcttctagaacatacccgcaccaggtcgcccctatgaaaccgaaagatgacacgtcatgagtgatggttatcatgctatcgcgacggaaggtacgtacaaaagtcaacgatgacaggcttgtccccctcgatctgcacaagtagaatccaggcgttagcttgctaaaccatttacatcacaagatgaatgtccgacgtgccagggacttgtattcggcaagatcttgaacagctcggaccattatgatgtctgtttgttgtggggtagtctacaggaaacagcggttgtaggtcgatatgagctcttgcttcgcaggttttcgtgaactagcgaggacagaaaggtaacacgtacgtgcgacttatatagtgtcaagaagaggtggcaatgatatgaggttgatcggtaatacagcaagcaaaggtccgacaactgttgctgattcaaacttgacaacctcaggcagttcgagctctcagctgctgtgttggagcctgagccgagtcctgtccgcgggggattttcgatttgtcagctagaacatcgcgccagtttccaccgacgtcctaaatgacgcgacgcaacaagcggcaaatgacaaatagaggcgatttgttgcatgtagattcgcctcggtttcaaaatcatatggatacagcggtgttacaacccgtacaaccttcgtaccacctttgctccatacctgcttgccgtatctctttgcacaattacacaaggtctttcccgctgaacaagggctgatcagttcttcaggacagctccatcggcacatccatcagatcggcatcatcaatccccatgagcgcatagtcgtcctcttcttcctcgcgatcgaacatgggctgatcctccccctcttgcttctttgcctttgtcgcaatgccgtccatctcgatcatgaacctggcttcttcctccttttccttgcgctgcctgttttcgatatcctcgatcgtccagagcgagatccccgtttgagtgtgatcaaagggttgcgagatcgatcggataaagagctttgccaatacggtcgccatgtcggtcgacaaatttgaatgggcctcggtaatgtattgattgatccacttgggcaactttgcccgcttgtccgcacgagcaaatcgctatttagatgaccaagtactgacttcagtatgcaaccgattggcacagcgaagaatacgacttaccttgtctgcgaacaccatcagaccccaatctgtctttcctcgtagtactcgtcctacacactgagccgcatgtcgcatggcgtcgaaggtcaggtagtcgttctccttgattctatggttatcgcgtaaaaactcgagtcttgctttaaggattcgactctcggtatactggtaaggtatactatatgtcgtagagggtcaagcgtcagtgacaattaagtatgagcgaccgatgctggaaaaacatacccgaacatgatgacagcacgaccatagttgctgcgagcagaacaagtttatttcagctcgcctcttgtgagcggcgaagtgttcacacatactggtcgaaatcgataccctctgagaccttgcctcgagcgacggatagtagtactgctccacgtccgttgttgcaggcctatagaacaacacgaaagtcagtttgtaaggcccaaagaacttggtccacgactgtgactcgcctttcggtagttgtccagagcgatacttgtctcggctgcgtctggggtttctacaaagatgagcttgttcttccagacctcattcaagataccctaaacagcaaccgaagtcagtctgccgccgctcccgaattactctgcgccgctcaccatatcattccaagcagccacgatcgattccatgtataaataactcggaaagaaagcaacgactccgtctggcacggctttgcacatgtcgatgaggatactgccgaaatttcgcacgactgcgggatcatttcgaacctcgaatcgagaactgatcgcgacctgatcgcttccacgtgtaatgacctttatcgaatgggcagcatcgtcgtgagcgatgaatcgacctagctctcagaacatcaccagcttaccatgggcaagaaagcgttgcgtgtaagggtcatagggtaactttcctgaacgacaggctggaattgaagaatcttggggtacatgtccaacggcgatattgtcccagaagtgatgaccacgctgctgaacctttcaaagactggactcattgccagggcaggatcgaggcatctgagcggacgcagagaaaatcagacgatatgacaaactgactggcattggctgtcgaactcacgtaaagtggaagatgggattcggtacagtagcagcctcggtctcatagggttcgaggatgaggagaaatcctatgagagattgtgttcagccaatgattcttgaaaggcgccacttatcacgcttacccttctcatatgtggcgactaaggtcgcaaattgtgcgagcttttgcaatgcgtgatactcgtcgatctgcgtcaattcgagcgtacggaccaaagaggtaagacgttctgcacaaaacctgttcaattcacatcagcgtccatctgtccaatggtcgattctccatggccttacctcaatggtcgcttctcgatataggtgatatctttcagatgctgtaaaaaggattgcggtgtttctgcgacgacgtgcagcactcgcattcgtgtctgtcgggactgtcagtcataatgctctatttgagaaccaatcaagtcgaccccaccttcatgtactcgacaaagcgcttcaggaatgcaacgaaatgctccgcctttctgatattcccggggactgcctcctgcaccatgtcttccgacaataccggattcgccagcatgtcgtcctcttccctcccctcgttggcgtcttgcagaccggccaccaactttgaatactcgtcctgcagcttagtggcatcggtccgtttgatctcctcgatcttgttttctaatttcacgcagcttctcgctgctgaatccaacatcggacgggtcaggtcgatcgataacgattcgatgcatacattgtcaatgttatgcgcctcgtcaaagacgacaatactgtctttgctcatttccttggagacctggtccgcgatcttgggatcgagtaggtagtggaaggaataaatgatgacgtcgcagtgtggaagctgtcggaagatgaccgagagccattagggaatgtttgcttgcaggactgtcggatggactgaccattcgtcgaattgtaaagtacgggcagacccccttttccttgccatactttttcacgtcctcgagcgtgaagataccgggagggataaggttacccgtctcatagttgttcagttcctgtgatgaccgaggtgtcctacacaatcaggccgggcatcggggaaatcctcacagagacgaagctgcatacctcatggaagctgcacaattcgacgcttcctgggtccgcccggcctttctcacatgcaaaggcgctggtcaaatctcgacacctcgcatcgacaatctttcccttcttctccttgctgacctgtcgtatggcacccaacacgatcgtagaatcctttagctcctctgactcgccaagaagactcaaacaagacactcacgtcgggatgcaaacacaggttcctccgactcgtcaaccccaaccctcggaacccttcgtccttggcgcccatctcttctcgatacaccatcagacgtttcaactctgccagagccttttcaatctcgggtacggttcgggagcaatagatgagtttcctgtccctagcgtaaaactttggatgagaggcgggggttcagccgtcagtcggcgtgatgagctacgtgagaccagacgaggaggtcaacacggacctgttggtacgaaacgatcagactcaggagggaaacggtcttccccgtcccggaaggcatttccagaacacaatgaccctgaaacccccaacatcgctttccgatcagtgaatgtcttcctcgctgaccctgggcggaggtcactcacaccggcatcgagggtctttttcagatcactcatgtactggtattgctctgcccaaacccagacactaagttcccggcctgatcagatgatagcggacgacgagcgggagtttacctggatagagcctataggagggggaggggatggtaaacacctggtacggtccagctcgagctcggggcgacctgggacttaccggtcgtatggaaacctgaagtgaaggggaacgatacacatggaagcacggacatcaggtttttgccccataagcagggcggtgatatgattgagcttacaagacggggagatcatcgaggtagaacaacatcttgcaagctcgcttctatgcttcaggtgatgctggatctagttagactttatcgaaagaggatagaaaaccgacggccgattgaagcagggttcaaggaccaagatcttggcttagctctagctcttcaagtaggagatggtggtagaccagatgtgccagatgagcgaccagcaaccagacgccagacggtatgagtgtgagtgtgattgaagctgaaagatcacccttactcatatctcgactcgatcgagcttcggccaatcccggaagcattttatcatccgcggtgctcaggtcaacgagatatgaacagatagaccagcagacaacgataatatcataggccatggacagcaaagtcgtacggtggactgtgttggatcgaagagagtcgagtgtttttatcctgcctcgtcaagtatccagggaccatccatgtccatgatgaacgccgttacaatgcaagagaggtctgtaaaccaagcggtccgttcctggcatcagcaatttcaactcgaccgatctcaatgcccgatctgtacatgtgataccacatataccacgctcttgcgtctcgaagctcgagaactgtatggactcgacattttattcggatgcatgtggatcttgagtttggagacgtcgaaaaggtcgattgcatgcattgcatgtttactttgtgacgaggatgagtggacgatgtttaatcgaaccgatcaatcgatcgattcgaaatcacgtgatgtgagttgatcgcaagtagagtacactgactatcaagctattacagcacctttgggtgtgtcatgacgtaccgtcagcggcagcggcaaagggttccacatcactcgtcgtcgtcgtcgccgtaatctgcaaagaggttcttaaaagccaacaaatcgcagtcgctgacattgactgatccacagttcaagcttctcgactgcatctcgccgtccagccaccgtcagcagcgataccgagaacggccggtccatcctccactaacacatcatcgagaaccagatcaagcagtcgcgatttcgtgacgacatcaaactccgaggaagatggtctctggcagatcaatcgtccaatccatctccacgacctttctgctccttgcgggaacatcctcggccgtgacatcgttaaaaggctcagcgaccgatagcaagatcgcaaagaacgtcctcgagagcaaaggagaaggatactgtagcgcaagtctcaacctttcttccctttattctcgatatcgtatgcgaatcgatactcacactgaattcgtatccgattcgccgacttttcagccttcggggccgatagagaacactctgtgtgcatatgaaacgatagaagagctgaataagcggttatatcccgagctgcacgggatcgtggagagcaactttttccgacattggaaggtgagcagcaatttgttaggggaaattaacagaccgttaatgcgctgacgatggagcatgccgcaggtggacttgttcagggagtgtccgttttggtacgagaatgggttctgcatgaaccgggattgcggggtggaaacggcggacgaggtgagccagaccatccgagctctttccggcctagttcccacaaaaactgaacggaatcgtctcgctgtgacctgctactgcccatagtctcacatcccagagaaatggcggacgaaagccctgagccaacttcgagttccagatgaccccaacctaccccccgggtgtgatatcaactcgcaatcattctgctacatcgacagcgaatcccccagctcggatgcacagtacatcgacctcgtcctcaaccccgagaggttcacgggatacgcaggggagagcgcgcaccgcgtctggggcgcgatctacgaggagaattgtttcggactgagcgaagaggtcgtaggggggctcgcacacgcggaagaagggagagcttgggcgggtagtggcaagggaacgggactgcagggtggattcggatcgcgagtcaaggacagcctggtggcgaaaaaggaggaagagtgtcttgagaagcggatttactataggatcatatccggtgcgttcctcggcctcgatcatgtcacgcttcgttcggcgacctgggctcatggacatcgtggtccccaggccttcacgctagcatcagcatacacatctgcgccgattatctcgatcaaactaccggagaatgggcgccaaacctacaatgctttgtcaaccggatagcgaccaacccggaacgactggcaaatgtctactttgataccgtgctcctcttgcgagccatcgcacgagcggcaccctacctcgaggcatacgatatagagacggcgaggtccaaagatgacgttccaggcgtcgcggccgacaagaaggtcaagtcgcagcttcgggccgtcttggacatggctcgggatagcggggccagcgcgtttgatgaaaaggcgctcttcaaaggggacgacgcgttggtgagccgtggtgttcagtcgcgatgttccaaagagatagggcgctcatttctcgctcaacatcttttcgactggtgggatgaatcaggaacttcgagatcaattcaagctcaactttagaaatgtgtctaggatcatggactgtacgggctgtgacaagtgcaggctgtgggggaaattacagatttcgggaatcggtaccgccttgaagattctgttcgagctcgatgacaaggcctttgagtgagtctggcgcaagagcaagttgaatttcggggctactcatttatgaccacgtcctctccagtccgaagcggaacccgaacttgctccagaggtctgagatcgtcgccttgatcaacaccatgcatcgcttgagcgagagcctgtacgctgtcgagacgttcagaaagatgtacgccgagacgcaaaaggtcgagcaggctcgactggcagaactggagggcgtcgaggcgcaggaggtacgtatcgacaggtcaggatcgagacgaggtcgggctgacttgacttattgcacaataggccaagaagcctgcacgtccgctaaagcctctcaggcgtaaagggaaacccccagccaagcgcacaaggacggctgctagcaacaacctagccgatcagatcagaggctacatcgcgacattgcgcgtgacgtgtagtcgctcgttgacccgatgtctacaacagcttggccgtggaccgcttcgggttctggcgggtctgtttgggacgcagagcgaagctgggtcgaagaacagcgtcggcctcaaggaggacttgtaacaagtagacatatacccatttattcagcagtacgtatgagaaacctctgaccaatgaagtcggtcagaggagtcttactgtagcatgcaagattaagagattcaggtgggaagtctacgtgatggacacaagagggctaatctcttgtgccgatgtcgtcctggaatactgcgatcataccccaccaaggacaaggataagtacctccgggtacttattgctcgaatcaagatctgtcaccggcaatggatctttacgcccaagcttgatagccgccgggatttccacagcgcgcatatggaggtcttcgcgtttggccattcccgagggacaattgctttgtagtgtgaggtcggcttcgtaaagctagagaggcctggatggtggagattgtgatacaccaatgtatttattgggacagggtaacagcgagaagtgaacggggccagtaggcaatggttatcgtttgagagtctgatgcgttccatgcgttataacgagaccagcgacaaggagccgataaacgaaaagctacataatatacaagtgatgatgttcggattggctgtgttttgcatctagaaacctcgccctcggcctctacataaaagtcgaggatcagtattgggttgggcgaaagggcagagaaaaagagtgaatctcgactgaccgcccacgagctcggtagggtgcatatcctccccgaccttggtatccacctcgatatccccctcgacctcgccctcgaggtccacctcgctgccaagctggccggtttgttcgtttagcggttacctgcaaaagagatgccaaggatcagtcactcgcgtatggaaatctagtccggtgctaattcgaggctcacggaaagttgtcgtccacggaagagagattcgttcagaaccattgcgttggtcaccgaagaagactcggcaaactcgacgtaggcgtagctgttgacagtatcgagggagttgaacacgcgatgatgcgtatgtgcagtctgcgccatcaacttaccctttaggatgacccgtgaacttgtcacagaggatggtgatccggttgatagccccacaggcttggaagtgttgctggatctcttctggcgttgccgcatagtcgacctgagaaggtagggcgaacccaggctttagcaataggtccctttgtccagcacttcgaagacgcctatcgagtaggacactctcggctcgagatagcactcacattgccgacatagacagaccgtccatcgacctcttctcttgcctcagcgtcgtccccctctgctgcgggagctcctgccggcgagcttgtttcagccccatccgtggctccagtacccgaggcagctccttcgagagtcttttgaagttcttttgactatcaagtcgataagcaccgtgaaggtgagctgccaatcgactgcgaccttgtgcacgtctcggctaccgacctgttgcaattccgaatccgtcgaagccaattgacgcttaagctcggcaatctcctggatatcgggtcgaggacaaggtcagcttgtacagctgagtagaattctagttgtcctggaacttgccctatcctcctcgtcgccaaagtcggcatccatctcgggtcgctcgtcagacatgttcgggggggttggcgagtagaggtttgtaagttggggattatttcgctatagctttatcggtcgcgcgggatgtttagatgtgctggattatgtgctttgctattgattagcgtcaggaagtctgctatatctggcagatttggagactcactgtgcaataactgatagcttgagacgactttgctgctcgtaaacgatctgggcctaggttctggttcaacttgcaagtctcaaagttccttagaatatgacgaaagcgctttctcacgcgcggatcacctcggtcgagagaaccgccagtggatggacgaatagatgaagtcgggcatgtattacgcttggggacagccgatacgataggttcagacaaatcgaacgtgggcatcacatggtcattcgtcatgggtcgttataggtggtacggacgagcgtgacggcgagattaatcggtcgtgacgcggacgaacatggcaaactttagatcggcgacgagatcccgctcgtgatctagtagttgcaaggtaggcaatgcgtgcgtgccgtcggccaacgccatgcactgtatccgggtagcctgacacgaacggggtagtagaggtggcagcgagacatcgtcttcgagcaagatgatcgaggtcggcgacgggctaggggctacgatagaagacaaagccgtctcgtcaatacaagcgcgtttcatctcactttgaagcgtcgcgctacttacagacagaatcagcggtcattggtgagatgagccgtttgataccctttagctcgtccgcaccttgtctgcgcccgctttgacccgagctgatcatcaatcggaccgttcggccactcgcgttcagcaaggtgatttccagataaaagacctcgtaacacttgacctcgttgccaggacgagcagcgtcgatgggcgaatcaggtggtgagttggtcgctccgaatcctcctgattcggtctcgctgataatgttggcggtgacgaccaggtcgcggtggaacggtaatgacgccgaggccgagctctgttgtgttttgccactctgtggccctgttcgtacgttcatcggcatgttcatcgcagacacagatctcccggcgatcgaaacggtcgaagcgggtctgccctttgcagcgagggtagagatcgaccggaacgtcgacgtgcggttcttcttatcggcggttttgagctcgatgacagtgttccacgtcgagctaaaggctgcgttgacgtattcaatgcgctcgcccttcatctgcttgactctgccgatcacgtcgatcttgagcgggacagattccgagcgagtaccccagctcccacctatttctccaccttccaggggcagcccgttcgagggaatcccattcggcatcgagctcgcggtgacgttgtaaatcagattgtgttgatcgtgtaaccggatatcaaaggggaaatgtccagccccttgctcggacgactcgctgctttctgccgacgtcggtcgaggaggtaatgccaatcgtacacgaggcctagtcgacaattcgataccagcagacgtaggatcgatcccttgtcggcccgcgacgaccttgacctcggcaacctcgaaagactcgccgcgaccttccaattgaccggcttcgatttcgatgcagatcgtcgccgcgaggtcgccttcgagtgtttgatccgagaagagtgtgctaccggtgatggagggctttggggctgtcggagggagacaagccactggaagtgtccgcatccggacagtaagtacagagaggatgggtagaatcgctcggaacgatttccgcaagaccgtcgtcgttgtcgccgtcggtgagttcgccttgacagcgcgaaacgaacgggaggcccgttctgaaagtctgttggacgtgctcgaggggttcaagcgggaccaggacaagcccgaagcgccagctaatcctcgaaagaggtccctctcctgactcttttctgccgtgacgatctcttggcccgagacatcctcgccgtcgggttcgtgcacgttgacgacaatctcctgaacctcgtccgtatcggtaggatccgcgacaatacctagccctcgagcaggtggcaacttgaaaccggacccgtcccgctctcgcagggtcgcatgacacgtcaaggccaggaggggtcgttgcatgtcgacgttggcgaacgagagcgggacctgggcgacaaagtaggccgacatggtgcgggcttcttcatccttgacgatgatgggttcgggtacgagcgatgacagggtcacagggccgtcccataccatgacgccatctatattggcgtactgggcataccgttgctgtacccccggttgagggttcggggtggtaggaggtacggcgaggttgacggcgagaccagcaccggatgctatcgccggtgtgacatctatcgagtgattatgtgtaggatgaagaggcattaccgatcttcttcgatcagagaacgtggctggaggtcgatgtgcgggttgagagggaatgaacgagcaggtcgccgtcaactacaggcaggaggtgtagcacatcaagctcccgatcgacgacgacgtgtattgcctggagactcaccttgaccgagcgacagatatgatccaaggcagcttgccatttatcctgcccggcgggaccagcccgataagacaacttgcagatgtagatcaacttttcgtctgtatatcattgcgaggatcagccgtttgcgagcgagagaccgtggccttggcctcgcttgtccgtgtacttgccataaaagcaggtctctctctccgtctgactcttggtaagatcctctatccatgatcccttgtcttccgccccaggaggaggttctaattcacccggaacgtgagggacgtggatgctaaactcggtctgttcgaacacgagtggaatatccatcgtcgacctggtccccaacagtgatcgattgcggatcgactaagtgtatgaccgagccgttccgtattgtcaggcagtatctggtttggccaggtgtttcgtagcaagcgggggtgacagtccaaggtctttggttatgcgactatcaattacacattacacaattacacaagaaggtaaagaggttggttcgagctaattgcccggagacgaccgagacgcgaatggcccaaagacaagagagagcatatgagcatgaaatgggtgcaacagcgaccatcatcatcatcgtcgtcgtcgtcgaggtggttcagggaatcctgttgacaggatcatgctgatgatgacgactggtttcatttctttcctggcagagatatatacaacgtacctactactactactagacttgttcaccttgagcgacattgggtatcgaacgggatagcttgcaacggatcagatcaataggttcgagacggacgaggacggacggagcagcgaatacgccttccgtgcgggtgtcgatagggcaaatgaagaatcgagcaaggagatgctgcgatttccacgtccgtccgtcctcgtcctcgtccgcttattcgccaaagtcaccgcccccgaaatcgtcaccgccgcccatatcatcatccccatagtaattgttcgtcacatcgtccccacccatagcctacgaaaggtgagtttccccagaggaagagtcagatcaaccgcggtccaatccagcaaacgaggtgtacttgtgccgagactcaccccgcccaaggccatccctcctaaaagaccggcacccgctccgagagccatacccccgcccattcccattccaccacccgggcgtcgacctccgccgcccatacctcccatacctcccatcatacctccgccgggcctcatcatgcctgtgattgcgtgtttcgaatcgcgagaacaggcagaacgggataagagcaagattgacaagtacgaatgagcgcgctggggcttgaaagaccaaggtaggtcatgggacgacgagccggtaatgacactgacctccttgttgagggtatccgccgtacccatgctgttgctgaccgaacccgcccatcccgccaccgaatccctgacccggacgtgctcccataccgggggagtgcgggcgggaaggcggtcggggttccgggatcatggtgagtcggtcggtcgcgctgccgagtcggcaaacatgagactgacttgggggcgacgacgttttgcagatcatcatctaccactttgaaacgctttttcccctctcttgcatcgatcattgatccttccgatcaactacccgcccaccttctccccttcctgccccgcactgcactgcactctcggactgtgttctccaactcgaagcatcctcgaccgaccgcgacatccccgatgatgtataccctgaatttcttcatcgcgagcacggggggcgatgtccccctttgcgaatgaggcgacaaaactcatctttgacaaactttgactgaggggtatccatgtcgccggtcggttttgagcgagcgaggaaaaagagtcttgcttgtaatctcgtcgttacgtgtttgctggaccatcatatacgtcaacccatcgtgctcatccaattgattcgatcgatcgatcgatcaaatctgcttgattgtcttggcatgtccatctcactctactcgctaccaagggttgtcttgataatgtatcatatgctctgtcgctgttgataaatttgcttccgttccctcccttctctcagatgccggaacgatggtgcaagcgtttccaggtagagaagaggtagtttattggactactacaactcaccacgacatcatcatcagcttgagggcaacagttctaccttggttttcagttctagcaacgatgatacaatcctaccccccgccgttaccgccttcccagcctctttcacctcgatcgggtaaagccacgacgagcaacaactcgcttcacaatcaccgacatcatcccacctcgtcgtccacgatccccgccccagtcaccggggggacccaaacgatgccttcaacgtcgtcttcgtcgtcgtcatttactccgagtaacgtcctgaaacgtggtgatgcttgtctcttctgccggaagcgcaagttaaagtgcgacgccggtgagtcctctcgccttccacgtcgcgaccgtgcgtcccttcctgacattctcctccccgatcctgtatcaccccagtcaaacctcgatgtggacaatgcacgaggctgaaaaagtctccttgcgagtacgatcattcgctggatgaacagtgccagcctgggccggctcgtaggacgaacggtcaggctaaacaggcgtcgagatcgggggagaggagttcctcgacatcgtcttatggaccatcgcaacccccacaaagcgatcctcgtggtcacgccggtgatgctcaaaacggtaccaacggcgttacctcgagagcagatgccgatcagctattgggcatggacatcgatctcgatcagttgacccgggattacaacctgtctactgggtccgggtcgagacaactcggcaacggcaacggcaactcggacccgatgtccgatctggcactctcgcccaattcgtacgaagcgcttaccactctgcttcaaggaatgtccgatgtcgattcgacgggtcaacacaacaacggcaacggcaacgtcaacgacctcgactcggctttagagctttccatgcagctgcccatgtcgatgcagatgcccatgctcggtctacccaatttcccctttcccaacccgttacaattcccattcaacctcgaaccgacgtacggcgagcagggatacgccgggatcaacaacgggaccacggaccccaacgtccgtccgagtgatatcctcgggaccgaggcgctggaagatcccgtcaagccgtggttcttgaagaaacccgccttgtcgctcctcggtgatgggaccaattatttcgagaggttcgatcctgtcgatccggacatggtcggaaaggacacgacgagcctcgccccgtccgggttcgagctcgtcatggatacctctcaaccgctagcggatgacatgcctagcgattcgacgaggatggctagcgagtacgagagtaatggtagcaggaacgacaagatggatccctttcgactgcctaccaccttccgcccgacttcggatcctaccagtgggtccgcctcgggatcaggatcaggttcagggtcaggatcgggatccgctgtgccttcccccgggtcgatcatcaacatctcccccggcggattcgatatgggtccatcggcgatgaccatggtaccggcatcagacgacatccccgccatcttccgtgaacgactcttgggatcattcatgaaacaaggcaggaggttcgggttgatctaccattgggcgactttttgggaacggatgcgtggtgaagaatcgttgagaccgcatccgtgttggatcaatgccatggcgggtgtccatctctcgaggttcggttgcagctaacgcgatgagctgacctaggcctcttttccccgttcgactcgtcgcagttcgccatcggagcaagaggatcggacgacccagcgttgcgcaagatggaacggcatttcgcacaactcgccgaggaacacttcaattcgggattattgcggttcaatcggatattggacttgatcagaggggcgacgtgcctgggaatgtataattactggacggcgcagtatcacaaggtgaattcctcgtaggctagggagagatcgaccgcgctaacgcattcttgtaggcgtgggatatgtcgggtcgagcgacccggtgagttgcactcgatcagacgcagggatgatccgctcccggactgacgatctatacacgcttttcccccctccaagactggctgttagttgcggtctacatcaaatcccaagcggatcgtttaccgagatgagacgcttgccctcgaacgtcaaacacgaggaagagccctgggtccgacgaaacgccacatttagcttgccatcccctcgcaccgaaatcgaattggccgaacggatccacgctttgtgagcctgagcgagagcacagtcagaacatccctcgagactgatctcccggacgatcacgtagttggcacgtgttcatgctcgaccgagctgggacgattgctactcagtggaatcccgtgatgcactacgaaaacattacgacgccttggccgttgccccatgattgctatctcaacgtgagtacggtccgtcaaagtgttccggtcgtgtttcttatcgagcgaactctgcacaaacaggacgccaacgttcctgtcaaggacgaacggatgactgatctgctcaatggtcacatggattcgacatgtcggagtacgacctacatgtgggtatcgcatgcgggaccaatagggatacgacacggacattgctgacccgattctgtccctttgaacaggactcttctgttgcaatcggtgaggcccgtcctgtcacctcgcgtttgacatcctactcatgcgccacatgtcaccttcccaggtcgccctcatcgaacgatgtgcggctttgctttccttgcctccagaatcgaccgacatgtttggccaaaccgtcgattcttcccgtcaatccgttcaggatcgatacctcgccgaaatctcttccgcccgtcgagtccctcaggcgcattatcagttggaaaacgccatcgacgctttacaagcccgggtgcctgaatcgatgaggaacgtggccagtgtcgtcgccattgggaaccaggacggatcgcaatcgatgacgatggtcaatatcgacaattgcgcgttggtaagcccccaagctcccggtgcccgcatcgtatcgccctggcatggacccgctgactgacagtgacgcgtcgatggcggtggatgaaccttttcagcaaacgcggttactaggcgctcagatctggttgcacgacgtggatgactggcagatggacaattcgcgagcgttgggaatggcaaggaggatggtctcgatcactcgattgattcctgatcatgagtttgccaatctggacggattcgtgcgtacccctttggcgccgttcgtgcgatagtgcgatgtgaacggtgctgacgctcaaatgctcgtctctttcgactttgactctgacctgcctgaacctggattgtgtaacttcagacctgtatcgtatggactcaagcggcgaggatgttgatcaaggaggttcgacgatgtacggtcgctggggatcagaaacgtgagttgatcgtcgttcgggtctggtgaccgtctttgattttggtggttgaccggacatgaaatcgatctggttacctggggtgggatcgataggtgtgaccgagatgaaccgggatctagactctatcgtctccttttatgccaaagccggcgccggatccgccctcgcgtgagtcctctcaggtctcgttggtgacgtacgccatttctgaccacctctctcgtcttgacttcactgcagtggttctcaggtgcacagagtgatgcgatggaggacgctggacatgaattcacccggttgcaagatctgctccgaagtggggccttcggggacgtgtctaggatgtcaagcttcgatggagacgaatgggagtgaacatgcttgtcgatggggtccgtgtggatcgaatttgggcggtgttggcacgagctgagggggtgctggctgttacgtcatttattacatccgattgtatcatcatgcatcaatcaacaacgttatattttgcatccgattctgacattcttgatggttgcgcttagcgatttgatgggacctgaaccgttttgatggattttgttgatgagaaattcaacttgatcacaactacataaacacagcatcgacctcactttgtcgccccctttgttatacaacacactgtcctccacttctcactcctactcacctcagggccacaccgcatcaccctctcaacagtcaacctcgtcttgtcatcacatgtaagtacacccatgctcatcctccctctgatcaacgccctccgtcgcctcagtcctgatcgatcgaatcgtatgttttcactatcatcatcagaaaccatcctcttcgattcgactaacggtcgaccaacgacctcgcctcgtctcgtgaaacctacctcgtcacctacccccccttcccttgtttccgaacctcttccgcccgatcttgatcaaacacacacactcgttacattccactcacgatcaacactcgaaagatgacacctccaacctcacccatccgttctatcccagccagatcgatcgacgtcgctcgtccttgtaccccggacaataccaactttatcctccacgatcccgactctccttgcatgatcgctttgccctctaccccgtccaggaccacgatcaacgtgaagccgagcttgggagacttgcattcctctccccccgcgcacaaccccgcatcgccaccttccgaccatcatcgaagacaacaatctcaggcggctcgtcacgatcgacaaggtagcaaggacaatgatgacgtttcgatcatcctcaagcccgtccacactttctacgacggcaccaggtcggctgcttcctcatcgacagcctttgagtctggtatcctgcaccattcgtccgagacctacctgatcatcgacccgcggaacgacccccggttgttcggtcagacccacaaggaggtctccctggctggacacgcaggcgcggagaagaggaggaaggtggatttccacaagccgctcaagttctggttgatctttgtctctttatgcttctcgtgcttgctctccgccttggatctggtgagtaccgtcgacagcgctcgatcacgcgctctagctccctttccactgatccaaccgtgcaacctcgatcgtatttcgctcgacagaccgccatctccaccgccttgcctgacatcatcaatgatcttcagggtgaagactacatctgggtcggatcggcttacgctctcacctcgacggctttccttcctttttgtggttcgatggccaacatcctcggtcgtgagtcggcccggtagtcttacgaatctcaccccgcgcgggatcgtctggactgatcctgagtgctaacgtccgctcaggtcgaagcacgatgatgctctcgctcgtcatgttcatgctcggttcgggcttgtgtggaggggctcggtacgtcagctcgatggatatgctcatcgccgcccgtgcggtacagggtatgggcggtggcgggatcatcgccatgaccgagatcagtgagtaatcatcccgttcgacccgtgtggaccgatttttcgcgctgatgtcgccactcgatcgacctcgcagtcgtcgccgacatgttgcccctgtctgaacgaggcgtattctcggggatcatcggttgcgtctgggcgtttgccagcgcgatcggtcccctcatcggtggcgccctcgcccagcaatggcaatggttgttcttcatcaatcttcccctcggtctgttcgcgctcggtctcgtctggtttttcctcgatatcaaggctcccaaggacgacctgaggacgaggatcaaacagatggatatcgttggtaacgtcttgatcatcggagggactacggccgtcatcctgggtatcgtgtggggtggcgcgcataatccatggaacgcctatcaggtcatcgtcccgtgagtcgcacgggaaggcacgttgtttctaattgcgaaaccggtagctaaccatacgtctgtccggtttcagtctcgccgtcggcgtcgccgccaccctcggtgcggttgtctacgatttccgctgggccgtcgaccctactgtaagccccaggcactttcggcgcgtagccggccgagatctgatgcccgtttcgaatagattccgttcgctattatcaacaaccggacgtcgatctcggggtactttcagacgttcttccgtgagtcgatcagtgtggtacgctagatgacactctgattgagaaattgtattgaatacgggacagacggaatcgtgaccatcatcgtcatctactacctcccggtgtaagtctctcctcatggactgccgaccacaatgcattaccggcgctgacccgccacgcggcgatctgcagctactttcaagctatccaaggatccagcccggtcaggtcgagcgttcagacgtttcccctctccttgaccatcgcgcctctggcaatcatgaccggtgccgccgtggcgatcatcgggaagtataattggtcgaactggaccggatgggtcatgatgaccacgggagtcggtctgttggctctgctcaaggtaagtcccagcggcttgatgaagagcccaggaaagatttcgactgatcatccgtgatggggctcaacaggaaggaaattcggtacacatgtgggcaggattccaagctatcgcagggatcggcgccggaatactctactcgggactcaactttcccatcctcgcgccgaccccacccaatctcaacgcgcctgcgcttgcctttctgacctttgctcgaagctacggacaggtctttggcgtcaccattggaggaagtgtgatgaacaatcaggcaagtcgagtttcggaccgtgctgtgctacaaagagtactctttttctgacaggcgtcaaattccctgctcacagctcaaaaagaaactgcctgctgcgtttggcgctcagtttgggtcggcgcccgatctgtaagcctaatcagtcacttcaattcaatcgaccttgctgaccttgaggaccatcatcgtcctcagcgcctacgctgccatcccagtccttcacaagctggctgaacccatgaaaacagaggtcatccacgcctttgtcgtctcgctccgtctggtctggctcgtcgccatcccgctctcggccgtcggtctgctcgccaactttttctgcaaagagatccccatgcaccagcacgtcgacgaaaagtggggtctcaccgaacaagctcgagcggaaaaggatcaagagatgggcaaagtcccggccgcgaccgcagtcccggtccccatcctcaaaccttcgccctcggttggaatcccggtcggtgtagcttactgaactgcatgacggcttgccaagtttcgcccggatgcaatcatggtcatttttccccttgatttttgatgacgttgtagatttgggtatttctccgagtcacctcgtgtccccgctgtcatattcatacgatccctcgtttgtcaaaacctcgtgatcccaatctaatatgcatacccgtgctgtcgatacaaatccgggacgaatcccatcgtctgtcgttcccccgtcttcccgtcgctcgtgccgggcccgctcgctacttttgcatcgtctggaccaaccaatccagtccttcttccagtccgtctcccttggtggcgcaactccctcgtaccgaccattctcttcccttttctcctcctgcgagaccgagcttgtccgaaatctctgctggtgacagagcaccttcgacgtcctgcaatgcaacaccggttcaaattctcgcctcgacttctctgatgggggaaggaggcatgtgccgtgacgatcatctacgtacctgcttgttggcgaatacgagcacgggcacgtttttcagctcgtcctcgctgagcatggtcaacagttcagacctcgacgtcggtagccgtgatgtgtccgacgagtcgatgacgtaaatgatggcctgcgatgatgaggacggcgaggagagagaagatggggggaatgtgaggaggggtggaatggtcagcgaatttgtggtagatgtagaacgattgtaattgcgcacctgggtgttggcatagtagcatctccagtacggccggatactcgattgacctgtcgacaggcggaccacgagctcgtacagatcagccgtctgctcacgtttgtgaacggctaccccaagcccgtccacacagacccgccgcccgaatcggccgagcgacgagttcaggcagacttaccgcctagatcccatacttgaaagttgatattcttatacgtcaccgtctcgacgttgaatccgatagctatcgaagcgacgagttcgagtatcggtatgatggtcagatgggttggcggtaggtgtcaaggcctggggacccggggaactcacttgggatcgtggataccacttccccgatctgcagccggtacaggatggtagtctgtcaaacacccaagagtcagctttcccggtcattccagcacaggggtattctccaagagttcctcgcaggtaaccgatcgtcggtacccccgggtcaaagaggctcaaagtcctcatcgcgctctaggctcatcgtgctcacctttcccgctgaatccagaccgaccatcaagatcctgacttccttgtctttcccccagaacgccaacgacgagagggccgagtacagccgtgataccgagacgcccatggttgcctgtaggaattgaggaaggaagaggttggtttcggggtgtatgcgaagtctgttgtgtttgattgataatccttgagccgagccgtcgatatctctgaaagcaagatgggcgagtccctgttgatcagcattgcaagctgggaatcatcatggagaggctccaagaagcccctcgactgacctcgatctagttgccactcgctgaagttgcgcggactcgtcgagctatgaggacaatatgaatctggtaaaaggcgaaccgggttggtccgacgaggctggcggtgaatgtcggcttggcacccagtcaggcgtgtgtttaactaggatgataagaacgacctagatctgacttgattacgatgagatgtaggtacgttgagagtcgtgtcgatggaagggtgtgtatggtatggtatagcttgtgctaggtgtccagcaggttagctgtagcttatttgtgattgatttgattgtccccgtctcgtggtcgcggtggtcgtcaacatgcaatcgcgcggagcatcaccatcatcaacactcatctcagcatcatccatgctatatgatcattcgacgtctgacaaccgttgtgaccttgacatcaactcttcttttatcatcctgtctactcaaagctatagctagctgctctcagaccctgttctgttcctgcttgaatagacccggaaattggagccagacctcactacggaaatgacgtcgacaccggtacgaagagctccgccaacaccgcccgaagacgaggtcgtagaaggagcgacagcgagcaagtcgattcggttcggcacttatgactgcttgcatggactgatcggatgtttacttccttgatggaactaccatctgctgctacagacgaacagattttgtcggccgcaaaggaggacaacgaggagctctacctggaagccatcgagcaggaacacgacatcaaccaccaagatgggtatgtcgatcataggtccttcgctgtcagcttggagtaccgttctaacatggcttgtccgacggctccggatatggaccatctagtttggggaacacgggtatgtcttgcgactctgacacggtgcacaacagacatacaacctcactaacgtctataccaatcattcgtacttgcgacagctcttcactatgcgtgagctaccttcccggctctataccatcttctcgagcttatctgagactgtccctctatcctctgcatcgtagcatcatctacgcatcaacgacggtcctcgaccatatcctggagcatgacgaatgcgacgtcgacctgcaaaacaagcttcagcgggatacgccgttacacttggccgtcaagattgaagagaacgggagggaaggtctgagggagtacttgggtcagttttcgactcgacccgttcggctcggggagcgaggagtggaggagcggagagcaggggttctcgagatgccgtgcgggggaatgtactgatgttgactggcgtaccacgtgttcctccatgaaacagtgcaacaactcgtcgacgccggggctagtccgatgtgagtcgtcgaacggtctcgaaaacgtcgactggcggacctgccactgatcataccaattgccatgaacctgatctcgtcgaccctcgcaggattcgagatcgacactcgctacgaccgatcgacctcctaccaccacctccacctggccggaccgacgactcggaagtcagagcgttgttacgaagagccgaggctgaattgcaactaggcggtacgggaggtggcgccggcaagaacggagatgtcgcggatggtgagtcaaagagagaacgaacgactgcgattttgaagacgagtggcttcggtaacggcacaattactgacggccgaacggtatacttggcaaaacgacagacgacgacttgatcgacgagggcgatatcgcttccgacgacgactgaagggctcggcgtatccggcggatcgacgtctcgcaaacagtccgtaatccccccactcgtttccgccgcagtcccccgggtatgatccgtcctgggtagcacggtcgacgcgcatgtagccacctgatcactctcctactagtactgctgttctatatgcatcatctcggttcgttctcgatccactcgtcgatcattgagatcggggaacgattcggctagggctgcgagtgtgcgggtacgaaaatcaccgaaacgagcgaaataagaaaaattggggctggaatgacgatccgggtctagacgccgaaggcgagggggggatcctggtcggtcggatcgtgcccgttcggcaccctccgcgagttcggcgatgtgcatcaaaggattaggtccgtaaacccgccacctctacgccgtgctctggcccgagcagcgcagtataggcagttcccagcgatcggtgcttaccgaggcactgcggcgatcagtgcgtaacgccccctgccccgtgcgccgcgttcgccggtactgtcatgggacgatagttgattgttttctttgtcgagataggtcgcgcatctaggcgggcgttgacccacgctgtggagtggagtgacgcatccacgtggtttgtcacaattcttccggttgacccctgtttcccgtattgccggccaacagagacagggggatagagcgaacgccacgctacttccggtgccggtatggggtggacgcaaatggcgaagcggatccccatagggtacgcctacgccgccgtcgtcagagattacaaaatttgctcttgccgctcacagggcacagggtggtcggttgacactcgaacaaggagggggaggctccccgtggaggcgcttggcacgatcgcatacatggtcgatcttccccttccatgccgtctcactagaggaaaaaagcgacgacggttgacgccgctgcttgtcgtaccgagacgcccggtagggtaaggaaagaggggggggggacacacaggcagttttgagggcgaacgcagagaccaaaagagtacttaggggaccgaggagcccttctgccgcgttcgagctacacttcacctgcacgccgttcggtccttccttcgaacaattcatccctttgcaatcgccctcaagcctttgcatcgatcatatacttttcgtccaacctttcaccatgtctgtgcccaacgagaagctcgacggcggcttcgaggacgtccctgtcaccaagcaggagccttacactcaacctaatgcgtatgagctcgcaaatgatcaggagcaaaccatcactggttcccctcgaacttcgaccgacctgacctcgatgccgagcaagaacgatctcgccgagagtctcgacccggtgtacgcagccaaggctaccgtcctgaacaatgcactcaacgaaatcggtatgggacgataccaatgggagctcttctgcttggtagcgttcggatgggctagcgacaactcgtggttgatcgtgaccagtctcatcttggctcccgttgccaacgagttcaacccgtcgacgccgacctttttgacgttggcccagaacatcggtctttgtttcggtcagtcggcgcgtttcatttacgcgtaaaaaagaggacatcgcgactgaccttttccgatcccgttttttttatcgtcgttaccaggtgctttcttctggggtgagtgcaattatttctggtgtccaacatcgacataatgggttctggaaactgactttttcgactgcaggatttggctgcgatatcattggtcgaaaatgggctttcaactgcacgctcggtatcgccgctgttttcggtctctgcgcggcgggatcgcccacatttgccgccgtctgtgtctttgatgccctatggagtgttggtgttggtgggtgagtgaagctgagatggacgacgttgacaaaaaacgggcaaagtcgctgatcagatttcggcttgcgtgtagcaacttgcccgtcgattccgccatcttcttggagttcttgcccggttcgcaccagtacctccttgtcgtaagcagatgatgggtgtctactcttattgatatgtccctgacactacggcgtatactatgcaggttctttccaccttttgggcgctcgcacagctcatcgccaacctcgtcgcatggcctgtccttggaaacttcacttgtgaacaaggagccgctacttgcaccaggtcggagaacatgggttggcgatactacgtgagcgtttcttgggttatttgagcatccgactgtagctgaatgccagtctttaacctcacagctccttatcatgggaggtatcggcatgatcatgttcatcctgcgattcttctgctttaacctccaggaacctcccaagtatctcatgggcaagggccgagacgccgaagccgtcaaggtcattcacgccgtcgccaagaagaacggcaagacctgcgatttgacgctcgaagacttgcaaaagtgcgaaaacctctttgtcggccctaccgatggcgccggatcgcccgaggacgagatcaagaagaagatggccaggagcggagagtccgagaagctcgacttgcaccacgtcaaggccttgttctgtgacaagaagacggcctggtcgaccaccctgttgatcatcatttggggattgatcggattgggtttccccctcgtcagttttgcgcgcttgaaatcgcgttacgagacataactgatcgtctcgatggccatttttacagtacaacgccttcttgccttacatccaagctagcaagggtgtcgaatttggcgacggttcgacgtgagcacacgaagcgcttgtgtgaattgctcatatccgaaacttacgctttgctctgctctcggcttcgcagcaacactacctacctatacaccgtctacattgccctcgctggtatccccggagcctgtaccggagcgttcctcgtcgagctgcctcgtctcgggcgaaagggagctctttccgcatcgactttcatgactggtgccttcttggtcggatcgacgttcgccaccagctccaaggccttgctcggatggaactgcgcctactgtttctcgcaaaatatcatgtacgccgtgctttacgccagcactcccgagaccttccctaccttgcaccgaggtaccggtaacgccctcgtcggaaccgccaaccgaatcatgggaatccttgcgcccatcatcgccatggtcgccggtctcgagcaatcctcgcccatcgtctacacggcggctggattgttcggactcgcgtcgatcatcactctcttcctccctttcgagactcgaggcaagatgagcatgtaaaatcatctcaccgggacttctttcgtttcgacacttctggattacgaccttctgctctcacgaatgtttttctcttctcgctcacccggttccagactcatagcggaaccacaaacagcttttcaggagggtgcgcccttggtcgccgccctcgttttactgtagctacctattagtatctcgatgtagcattttagcaacatgcaaacccagatatcatcttgcatgcgacgcccagtctaccttgtcgctgcggtgcttaagcgggactcggcttctctcgcggacattggcgtgtttttcaccattttttcaatttctgtcacgatgtccgtcgatcggacctcggccatctggtcggtcaagccagagagggaggccagagctgacccaaatttactgcacctgtttgctgcaactgtacaagtatcgccttatgccacatcttcgtcaatcactcgtggagcctgttcatgtcggcgagttccgcctcccagaaacgatcgaaaggcaggtccgccgatctgcccggttttactgggagggcggatcgactcggtcctgccagggctacgaaacgtaaacagcccacgactgagcctgaaagacaggaacctcgaagcaagaaaccccgatcaaaccgagagaaacctgcacgaacgtctagaacagtcgaagaggggaaagcggacatttctcgtgctcgcgtctcgaacgaactccgagtagggacagatgaactcagcagtgcctcggaactggtaaaagtcgaggcgaccgagatcgtatctgcccatacaatcggactaacggatttaccagtcgaggtgagtcattcgcgaactgcctctcatcggttacctagctaattgatctgctgatgcttgccttatagctgatattgcagatacacgaaatctcgggctcttccgagttggcctgcgttaaccgctacatctcgtcggccttgaagaatccgacacccctacatgccatccgatggttgatgagccgatacgccgagcagggaagcgacaagtttctttcgctcgcgcttcggcatcccgtttgcgagctggctctgttgagaacgattgaacagggctggggagagcttgcacagacacatgagagggccgagggtcaatcagcgcaaccgctatcggctgtggcccagaccttgagacccatgttctcacgcaacaacctgacctcacttccctgccacaacgtgcctcgacgcatctttcgtaccaccccaagagaaccgatcatcaacaagacgggattcctcttggaccccttgtctccgctaggtcgatacgtaacgcagcgattccaacctagctccaaagttctgtcgtatggagtccgtcacgcagcctataccggacagcacgacatggccgcggaactgatcctgctaggtggcgagccattctccagcggtggtctcgccttggaaattgcgatgcgtagaggagacctgaaaatggtccaaatcctggtcgaaacacctattcgagcacatcacctgggcgacatcaatcaggaaatcaaagcgctcatcctcaaatttgcaacgcgagagattctggattatttcatcaaggaacgaggcgtcaagttgagcctgggctcgattttggcgctatgatacggcatggaaagcagggtcgttcatacgtcctgtgtttcatcacgacaaccatgtatccatatgtagctctacggatctgtatatatatatctagactcacctcgaatttgaaaatggctacacctcaataaccgccacgatcaaagtccttctgtcgggaaggctgatcccttctcgattctgaaagtcatcttgcacggtagtcttggccgccgtaaattgttcatggcgatgaaggtagggtctagagtcatgagattccttcatgacactcttcgggatcaagatccgagacaccttcttacaagacgtcaaacaagatttagcaagacattgcgtcacaatcgcgagcagagttccgatatgcattgcgatgaggtctcgaagaaagtctcgtctttacccgcaaggacgacagacttacaatgcgcttatttctctacctcacgtcgttcaagactgagcatgacgaccaaagcctataacgcgcgaggtcaccttgcggcccatgtgacccttggcaccgaaacgttggtccttggttctccagcttgcatttctcagaacggttaatcctcagccgaggtagaatctggtgccattcatacgatcggtctaagcacagaggcttgttcgggtcatggcggcacaccgtcagaagtccctggggaaagaaaccaactgactctaaagtttaatcagtttccaggaaacggaacatagcccgtataccatcattgcggaccgggattcgacttcgttaacggtgaagagcgacttggcatccgggctgaagtgccggtggtgcaatcatcagcatcccatcctttggcgatggtgattgagacaaaggccaagaagagaaccacccatgacgccgcatgatccgcccatatttcacaaggccagacggcgaccggcgcactgggatcgcctgtacttcggatccgtgacggaagaccaaagacagagggcaacaatgcggagaaaaggagcttggtgaagagcttggtaatgtgtttcacatatgagaacaccacggtacggccctgaccaggcacacagggaagtgacaagtatagctgactgtggctggagtaagtgatgcttaaccttgtcaggttcatttcgaacatgcacccgacttgaccctgaaaaacttaggtggtgatcatgccttcatactgccaagagtcgtaccgggatagacagcgctacaaagatttcctggggtggtctcattgtatcactctccttctaccagaatcgatgaattataccgctccgatctgtcatcacattggcaccagcttgtccatgtcaagcgtgcgtgaagtaggtaagaaaccagagacaaggtttcacaacgatactcccgtttgcaactattactagctgacatcatacaggatggttggctgacccgaaatcagccagcgcagcatgagggagccgtcctacgactttgttgatcggaaaggtacacagcgtatgcacgtcaacgagaagacggaaagtatacagtctcccttgaaacgcgggttacgggtttcagaagcgcaagcgttgactgactagcgcttgaacgggtgatcgtacgcaagctagacttatgagttactggcgatacaggtcgaaagacaatctcaaagtcatgtgagaggatttttgactctcctgacccgttcgggattgaccgcgatcataccgctacaatctcgttcaaccgctcgataccacagtcgcgtttcttctccccattcgacagacgtgccgagacgaatctcttgggtcgtcaacggtctcggccaaagttcgatcgtttcatcttcgtgcttgtctctccgaaacccgctagtatcctcgaatgccttatttactgacaaaaggggcaaaacctgcgaggcaattccttgcaaaggctgagaacaagatcatcgacacgccggccaagaggatccggggcaagaaagttgatgttgaagctagagttcactcagttcgaacgctactcataaactgggcaagtcccactgaatgtgacgtatcgaaattgtaagactcctagtagatggagaatcagccgtttgtatggcgatagatattgaggcaattcctctggggcggttctgcatcgcttggggagaacgcgaattctatcggaagcttgccgacctccttgggacctcctctatgtgtcaacaagcaggcactgctctcggtcgatgttcaaggtgctcccacacctcgcctcctcaaacaccatcgcaggagatcatcacacctcgaacctttacgcccttctggacttggtcatgaacgacaagtatgatgacgtgcagccgtcacgggagcgcgaaacgaaagtgtcgggaagatcggtccagctcgacgatcactacccgagacactccagcgtgggtcggtcatcgtcacgtatccaaccggggctcgtcctgtatggaaccgtcccgccggtcgatcatccctcggatatgacgacaagcactgtcccggagtcaagacaattaccctgcaggtcaccaagccgggtcctggccgtctcctgtagaggaaatcagggatgggtctctcagaccgcctctcgataccggtctagatgatttgcttgactagcaaatcgcagtgccgagcacatagcgtcacgttgatggttggggaccatgcgctccgacttggcaagcacgtcgggtcgctggtcgacatgatcgtacgtctgtggcacgagccgcaacgcatgtgaaagataataaataacaatcatggtataattcgtcaacagaccccctcacgaacccaatgccccctgagacatgtcctcgctctacttgtcggcgctggcgctggacgtctgagcctgagctccacccatcaaggcctggcctaccgcctgaaccgaatcgacgacgccggctacgacctctcccgccttgtcccccacgacggtgacggtctcgccaaacccacctgtggatccgaacccgcccgtcccacgctgtgtctgatcgagctcgtccacctcgataatgtcgggggtgacgatccgctcgaggacgagttgggctatccggtctccctgattgactgcgtcgttgagggagaagggacgggacgtgaaacgttcgatgcgaaaaagaagagctcagcccgggttccacgtgatcatcgcatgagatcaccgtgactgaccgacgaaatcctctgcgccgaggttgaacaagaggacgaacacgcatcctctgtaatccgcatcgatgacccccgcgcccgtgtggatcgagtgtttcgaagcgagacccgatcggggtgcgacgcgaccataagtaccgagtgggacggcgatggagagttgggtatcgatgagagccttgccatgggcggggacggtctttccctcggcgctgtaccgacgtccaaagtcgacggggagggggaaaagtgagcgaggagacgagaatggtctgtcggaccgtgtattctcacgcgtagaggtcgtatcctgcagcgagggcgctaccacgggtgggcaatgtggcacgttggctcaatcgtttgacctgcatgccggcggacgcggggagagggttcggggcggcggcggcggcggcggtgttggacattttggattgtttcgaggttgtcgtttcggtgagtggggtaggagatggagatcgtttgagtgacatgtcacgtcgatgcaaggttagaggtcggtggtcgttgtcgttgggatcgtggtagtaggtagaatcgagcatgtgatgatggatgatgatggtgtatggtcgcgttcgtgttggatcgcgtcgcgtcgaacgcgtttgttgatggcgagggggagaggtcaagctaaatgagtgacgtgtcatgccgtatcgtgacgagagtggatgaaggaaggtgatgtacgtaatcgtaaatacaaacgtgcaaaagggttaagtccgacccccgcgcgagttgcgagaggccgagctggcctcgcgcgagaacaagtcgaatcgtcaaaacaaagaagcgcgcgacgttccccctcctcgttccaagcgcgcgagctctctccctctctctcgcttgaccctgcttgtttccacctttggcgtgctcgctccccttgctgctgctgctgctcagcccaacccccccagccacggctagtccaagccaggcgaggcgaggccaggccaaccccacccggatcccccctacgaccgttcgacatctttctcaaacccatcgtacccacacgtctcgagcgacgtcccttggcctaccttgcccccccttgctccctcctcgttctctccccaggcaaccaacttcggtgagcacccactccttgcctatatccacatcatcgactcgtcctaatcttcgttgtctgtgtgtgtgtatgtcctgatcctgctcccctcgctaggcatctaccaccaaaagatagacgaaaagaaggatcagcaaagatggcccctaccaacaacaagagtgcgtttctttcgacggggtttcccccatgcatcgcaatcatcgggcgaggcgaaaagggcgaacatgggggggttcagacgatgtcggcggggtggggcaagtgagagggtatcgatcgatggacgtggacggagaggccaggtctacaggcagcgagaattcggaccggtgcgacgagcaagatgcaacgacgagcaggacctgtgtgtgtgtgtgtgtgtgtgtgtgtgtgtgacaaggaggaggaggaggatcgaagagacgtgtacgacgaggactggatcaagaaggctgcatgcggagatagcattcccatcgccctctttcccgttcggcacgacacgacacgacacgacgcaagacgacacctcgacctcgagctttgtttggacgacacgttccgccatgccaacccggtcggaagatgtatcggacgacatgctcggtcaggtcgctcgacaagcgtctctaaggagatcgaccgagtctcgtccagaaaaatttgccgatctaccccgagaattgttctgggcgggactgggacgaggcgatcaagtacgatcgtcgcccgattgccacacccacttgacaccacaagtctggctttggaaaaagcatatcactcaacgacaacctcgacctggctaccaacgcacgtcccgtacctctcgcacacacacatgcacacctcgctagtcgttcgcactcgtcctcgcaccggactggttcctacttgacctgtgtcccccccgttccttttgcctcgtcctcgacctacccctcgatccctgtctgccggcgcgtcgacctcttgtctcgtcttttcacctctctcgatgcgaatcccctgttcctcacagtacagactgaccgaccttgtttcccccgcctttttcgcattcacagccgccggcaagcccgccgatgtcaaggccaaggccgccaagaaggccgccttgaagggaaccaactcgacctctatccgcaaggtccgaacctcggtctctttccaccgacccaagaccttggccctcgcccgatcccctaggtaccctcgtaaatccgtcaaccaccttcccaggatggaccagttcaggacgatcaagcaccccttgaacaccgagaccgccatgaagaagatcgaggagaacaacacgttggtgttcatcgtcgacttgaagagcaacaagaggcagatcaaggaggccgtcaagaagttgtacgacgtcgaggccttgaagatcaggaccttgatccggtgagtctcggggcgggcgggtcgggtgtatacttggttctcgaacgctgatcgtcgtcgacgttgctctggcttgcagacccgacggaaagaagaaggcttacgtccgactcaccgccgaccacgacgctcttgacgttgccaacaaggtcagtagaggtgttcacgctcgatgataccccttttgtttgcgactcggcgactgatgtggagtcttacggcgcattgatagatcggattcatctaaacgattctcgtttggtcacggaggaggacggggggggggagagatgatgatggagaaagagaggggcgggagagaaagagaacgcgagtcttttcttttgttttcgtcaccttttgatctggtcgtcatgtcatgtcatgatttggatggatgcctttctgttctctgattccgtgtgacaagtcgtccaagtggttgcctgcttgcaagctgcaacatggtagtggtggtcctagttgatgctggctggctggctggtagattatcgtttgacccgagactccccgtcgacgtcatccgtctctcgcgtggacctgggggggggggctttggctggattgggttcaggttcaacgacctcccacctccccaatcactcacttccggccgccatactcactcacttgtcatggtcccaggacgaccaccaatcgatgggcagatagcagagatatatcctcgtgatcattgttgcagtcgtcacctacctgcctgcctgtccttcgaaacctcgctcagttgggacatcaaatccggccgtcaaatcgcgtcaccgcaaagcaccaccgagatagcagcgaccaagattgtccggggggaaagggcacgttctatccaacccatcactttacgagtctcatccgggctcggaccgagaaataccaggacggccgtcgaccaggcatactcgtcggtctaggacgaccctcgacataccatcacactcgtccaggggacaagctctgacggcgagacataccgcatcacctcgcttggtccatccgtgttactctgcatccccgctcggttcaagctctaggtggtaacgggaacatcctcgggcgatccaagggaccatggccgtcaaggccgcttcgtgggctcctcaaccggcttatatggatcaatctagagatttcgagtcggcgcgtccagaggtcagtccccgttagaagtgggtgggtaaaaggcgagagggtgctgatgggttgctccgggaggggttacatagggtatgacagggggtcacaacgagtatgagcagttcaccggggatcggggtcaaccgtgagtgtcaaccatgcatatccatcgtcgtcgttgtcgtggctgaatgcacatgccgtctcgacgatatcgtacaggacacgatcgtcgtacgctccaccaccacactcgcactcgatggatcctcctgcagcaggagcctcggtccagcgatccaactcgctcagaccccagtcttcgaaccggatacgaccgccgactgatctctcatcggcacctcccgctctaccgcctccccagggttacgcacctcgacatcccgacgccgatcgaccaccaccaccaccaccgggaccgaacaaacccgtcgatcgggtgaggggggaagagtttgaccgtgaacccgccggtggaccacctcgaacgcggacgggaagcgatccgaatgtccgggtcaagaacgccaggcaggtcggggattggcagttgggcaagacgatcggtgccgggagcatgggcaaggtcaagacggcgaccaacgtgtacactggggaaaaggtacgtcgcacaccccctgtcggacgcccggtgttcaggtcgtgtcaaagggcgtcgtgcagtgtcgtccgggggctgataactctgctaccctggtgtgatacaacagtgcgctgtcaagatcatcccgcgatactcgacacccccggccgcgccgaaacctaccaacggggaacccttggccgcgggactcgagccggaaaagacggccgccgtgcgcgacgcttccaaagagaccaggacgatccgggaagcttcgatctcgctcttgctacaccatccctacatttgcgggatgagggagatgattgtccacgcgaatcactattacatggtgttcgagtttatcgacgggggccagatgttggattacatcatcagccatggtcggctaagagaacgagcggcgaggaaattcgccaggcagatcgccagtgcgctcaactattgtcatcggaattcaatcgtccatcgaggtgagtgtctctcgtggtggagcgatcgatcggcctccgagtactctttgactgatcgagcgagtcgcgtccgtgcagacttgaagatcgaaaacatcctgatttccaagacgggcaatatcaagattatcgactttgggttgagcaacctctactcgccctacgatcacctttcgactttctgcgggtcgctctactttgccgcgcccgaattactcaacgccagggtgtatacgggacccgaggtggatatatggagctttgggatcgtgctctacgtgctcgtctgcggcaaagtaccgttcgacgatcagagcatgccggccttgcacgccaagatcaagcgggggttggtcgattaccccgcgtggttgtccgcaggtcagtctcaagacaccgcgcacggtggcggcagtcgacacgagctgactggatctgcgttgatccctctcacgacacacagaatgtaaagacttgctatgtcggatgctggtcaccgacccggcaaatcgagcgaccttggcagaggtcatcgcctcgccttggctcaacaaggggttcgaggaacccaccgactcgtacctcgtcccacgggaacccttgcgtccggaagagctcgacccggaagtcttgcgagggatggcaggattcgaatttggaaccgaagacaacatccgccaacggatgacggacctcttgacgagcgagacgtacaaacgggtacatggcgagtgggagacgagacggaccacccagagaaaggtgccacgggaatgggacgtcgacgccaggaatcggacggataacgacgggcccggtacgtcggcttcacctggtccgggcggtctcgtgtcaccgacaaaggggaaaccatcgaaacggttctccggctttgacttttacaaaaagggcttgttcaagaacagctcgaccgcaacaaaccccaaggacgatgcacggacggcacggacgtcgggacccggtcggacgctgggagacgatcaggagtacctcgacccgacccgcggctttcatcctctgatctcgatctactacctcgtacgggaaaaaatggagagggaacgagtctatgggcccggactgtttgcttcatccgaattgtcgttatcgtcgcaaacgccagggtcattaccgaacggtacgactggagctccaaacgcacgagcacccgcgtacggcatggccctgcctcgtctgtcggtccccgagacgtcgcacatgccagcccgcggatctgaatccgttcgagccatacccgcctcgagcgcttcgggcggtttcgaatcgcagccgctcccgaggaaccgtggcgagagtctgaatcaaagggcagaccgcgtcaacgagttgcgtgccgccggtgtcatgcaacacccagaggaagactttgaccggagtcggctcgaccaggtatcgccaaagctaccgagcagcgtttcgggttcgatacatcgtcggagctattcgatgaatggcggaatgggcagtccgacagagatgcagatgccccgtatggtctcgagcgcttcccaaaatgtaaaaatggaccacgcggtcgacgaagatctcgtcagggatgcgcaaagtttgaccattacacaacagggactcgttagggaacccgactcgttgcctaccgactcgtacgaggcagcccctacggtttctcgtcaagaccgagcgtcgatcgatccgacgacaagtctcgtcgactcgtcggctgaaggcatcagctcggaagccgcaccgggccatacagcacgacaagatcaagcggaggcgcggatcgaccagaccccgataaagatcgatgccaaacccgtctacctcaaaggtctctttaggtgagaacgggatgcggccgagacagttgtgaaaagaacgagactgatggttgtgcctgttgttccatagcgtcgccacgaccacatcaaagaacgtggccacggtccagcgtgagatacgggccgttctcgaccgcatcgggattcactaccgaccgaacaagacgggattcgagtgtgtccatgcgccatcgatcgatttgtcttcggtgcaacccgtcgagggaagcgggcatacgggtggcggtcccagacggcctcccatggccatggctggggaggaaggctttgatgcgtgggcgtttggggacaatggatctgccgggagcgctctgctcgtgagatttgagattagcattgtcaaggtgggtgacggcgctttgaccgcggtattcgcggtccgcagactgatcgccgtactatacgatcgcaggtctcttggcttggtctcaacggaattcaattccgtcgtatcggtggggacggctggcagtaccagatgctggctaaaaggatcttggtcgagatgcggctgtgagtgggccaggccgattcggcatgccacgagcgattgtgtgtttcgagtcacgtgtttttaatgataaccggttgtaagaatgatgcattggtttgtgaatcgccatatctgatatctgcccttgacggcgtcaccaccgtttgacaagacgaattgacgcgaggaccgtctcgcaggggtctatcccacgacaaccgacgtccgatggaatggtcatcccgagcgctcgactcgggtctgagcggccgaacgggtcatctcgtgaggtccaggtctaagctgttctttgtctccctgaacgtgcaaaagcaccgaatctcgagcgcacaggtcttttcaagggtgtctttggtgaggaccagcgatccgccctctccggacacggtcccttccagtccagttgatagggaagactctactcatcacgatgatgaacaggggccggtcgatggagttcagcgtacgggtcgtaccatggctctccttgtgaggtcagcccgaacgacgtcagctcgatcgaattattttgtactcgtatccaatcggaaagtcgggaagggtcagtgggaccagatctcggggataggctcaggctctgccgagtcgacggtatggggcatagcggatttgactaccggtgttaggagaaaaccatacagatgtttgcgaggtcgggtctcccaggataccgacccgacgacctgcatcattgttggcaccgaaatcgaccgagttcgatcgagatcaaggggaaggagcgctctggtcagattgtgatgctgattgtgatgattataattccccgacgacgagctagtccattcccgcctcttacgacgacgacacccagagacgaagaaacctacactaaactatcctatcctcgcctcgactcggggaaccaaccgtatcgtttcaaatcgaccttttccttgcctcccccgcgcgcgtcgatcgaggttcctcccccggcgacggtgatcacctcgacgccctcggcgatcaaggcgtctcgttgcctctggacgctcagaccgccatctcctcggggagatatgaacccggcagagctgatgactcgctacaaaatccgggggatcgtccgagttcaggtggatgggacggtgttggtacaagcgtgttgagtgagggaggtttattctaggcgagcggtcgggaggcttacctgccagggtacggtcgagttgggtggcaagtcacgcatagcgttcccgacgtgcctgtgtttgtcacccatacgatgaatgtccaaaggggtttggtagtcagctactacgaacccgcgagattcgccctcgagatgtgcgaaaccggagtgaagggacgaactcacctggaatgattagggaacccgctcaagatggcgatatgcttgtacgtggtgaccctgccctgagggatcgaatgggtgatctcgtagactctcgatgtgaatacggccatgttgttgttgttgttgttgtcattcccagcctcgtgctgatgatcaagttggtccgacatggcttgatcgagtgggaaaggatgactctgctacgatatcgaggagggtgtcatgggcccaccgtacatcgagccagacgtgtacgttgatgcggtagaaagcgccggggttcttgcgagacctggatccactaatactactgcagtagctcacagttcgagtctccagcttggtttttcagggggcgcggggtggttgggttgcaattgtaagtagacgacgatgatgatgatgtcgaggtatacccatgtacgcttgtttgttttgaaagtgaccccaagtgtacttttacgtgatttacgattctttggaaacgcgtcgcgacgcgtagatgttcaatttcaagagagggagaagaggcaggaaaggtagaagaaaggtaaggttagggttaggtaaggttaggtaagggccatgggatacgggacacggcaagttgaattgggttcgatcgatcgaatgatcaagggggggtacgagcaactaccgagaagcagaccatcaccctcgctcaaatcaaaatatcattacaaacatccttgacatccttgacatttccttctcctctttctactactctggtacactctacactcttgatagatcatctcccattcgtaaaggcgcaacaagtccatctgcgaccgccttcccaggacaccatccgtccacaaaggaagggcgaaacaccttcgaaccacacatacactcttgcatcaacgtcccctttgtcacgacccggaggattcataagaagaagcgacatcgctgcctagcctagcagcaaccagtaacaatcaggacggatcagaccgtgttagacagtcatcgcacaattgtaaactcgatcaaaggcacagcaccgcgcatagccagacctacgtctaggtgaggagaaaggatgtcacaatcttccaacagcgtcaaggacgagtccgacgaggtggtcacagcaaagatggaacgacgagacgacaataatggggtccagaacggagaccacgccaaagtcgaggacgatgccgactatgatcccgacgagacgaaacctacccctctggcaaaggcgcaacctgcagctcctagcgagacgtcgttcgaggcaagtcgatcgtagatcacaatgagagacgcacgcccactgacgatcacctccttcacggtggtttgcaggcggctcaaaggcagaaccgactcaaattcttgctagagaaatcaggcgtgtacgccaagctgatcggagaccgtatggagattcaacgacagaaacgggtcgaggctgagcaaaaggccgctacgaggaaagccaacaaggagatcaaggcggcgacgacggtcacgcaggggagacgggccactgcgcgtgcgacggccaacaagaaggacgagtcgacgagcgggggcgcggtcgagcctacggtggtgcctgccaaacggaaacggggttcgaataaagacgccatcaaggaggaagaagaggaacatgtagagctggacaagacgatcaagccggacgacgaggctgaagcgaaaaagccttaccatggggaacagcccgccttggtcaccggggccacgctcaagtcgtaccaattggccggcgtgcaatggatggtctcgttgtatgagaacggtctcaacgggatcttggcggacgagatggggctcggaaaggtgcgtctcgtctcgtctttgccccccttgatcggaggtccacgtactgaccgctcgacatcgacatcccacttctagacgatccaaaccatttctttcatgtgtcacctcatcaacaacaacgcacacggacctttcttggtcgcctgcccgttgtcggtattatccaattggatcaaagagtttcaaaagtttgcaccattagtgccggtgagtctcggacgcggtcatgccacaagcgagatggtcttgacgagagcgttcgcatgtaaacaggtcttgatgtaccacggtactccgaccgagcgtgcagagattcgggaaaccaagatgcgtcccgaacttctcgatatccccctggcgcgcaaaaaaccgatcccgggcggtaccgggacgattcccgttttccctgtcgtgagccggttgtggacgacgaggaccaggttctcaggctcacattgcatgtttttctatcggtcagatcgtaacgacctacgagatgatcatcaaggatcagaaattcctgagcagatacaagtggaaggtgcgtcacgttgcgagcgcctcgactttggagccttgtcgactgattcggccggcatctccatctcactagtttatctttgttgacgaaggtcaccggctgaagaacttgaactcaaagtttgtccattccttgagacccgtttgcgcttctcctcatcgctaaacctgacctctccacaggctgattcaagaactcaagtcgtatcgaagcgcgaaccgtctgctcttgacgggaactccactgcatgtgagccttcaagccgggatccgctgaacccttgtccgactgacatcgcttgttcaacgatagaacaacctcagcgagctctggtccctcttgaactttatcatgccggacatctttgacgatctggacaccttccaacagtggttcgactttcacgacatgaaacagggggggacgagcgagttcctcgcacaaggagaagtcgtcacacagctacacaacattctcaagccgttcttactgcgacgcctaaagacggaagtggagcaaaacctgccgccgaaaaaggagtacctgttgtacgcgccattgacgcagcaacagaacgacatttacaaggcgatcgtcaaccacgagatcagggattacttggtcgccaaaaagatcgccgagggtagcggcgccaccactcccgaggagaccaacgatagctcggccgatacgtcggaaacggaggccgacggttctgcacctcgttccagtcgtaggcttgccaagagagctcgattcgactattcgagagacacaaacgacaaggattttctcgagggcatcgagagtggagacgcttccaagctcaatatgaccgctcccaaggtcgaaaagaccgctcgtcaactcggtcaggaatgggcagtcaaggaagctagtacgtgggacttgttcgtctcgatacgtcatgagcaccgaatacatgactgatgttctacgtgaaccaatatagcgaaaaccgtcaacaacatgaagctgcaaaatatgatcatgcagctgcgcaaggtgagcgaaaagccggttctgacccgtatgtagggaacgtcgactgattcggaccccgtgtagatttctagtcatccgttccttttcgactggccccgggatccagaatctggcgacctgatcgtcgacgacaacctggtcaatgcaagcgggaagatgctcttgttgcaaagacttctagacgcattgttcgatcgcggtcacaaggtcttgatcttttcgcaattcaccaccatgttggatgtgatcgtacgtctgtactgtcgaggtcgtttaatctgatcggaagctcattgcggtatggatcgccctcgataggaggattgggccaacattttcaaagtgagttctctactgcctccgtaacgagtttcaaaattggttgacgttgtcggcgagtgcagaattggaggaccttcaggattgacgggacgaccaagcaaccggaccgtttggaacagatggaggagttcaataacggcggggatgaccctgacgcttgcaagctcttcttgttgagcacacgagctggaggtttgggcatcaatctggtggcggcagagtgagcatgacaagcctacatacacgggacacgggactctcagcggctaatctcggcttgtgtgcctcgaaaaagcaccgtgattttcttcgatcaagactggagtacgtgaccatgacaccaaggcactgttagatcgtttgctgatgcggtggtcatcattcagacccgcaagcggacctgcaagcccaagaccgggctcatcgtatcggtcagactaggcccgtccttgtgttccgactcgtcacagcacgtaagtcgacggggttgactcgaaagccaagaatctagctcacatccgtcggaatcgttcagacactattgaaacgaaaattctgaaagcggctgggaacaagagaaaacttgaagccatggtaatctcaaagggcaagttcggggctgtcggtgccaatggggagattcttcttggccgagaagcgaaagggaaagggaaatccgtcgaagagatggccaaggaattgctcgatcttgacagcgaggagatcaccatcgctaccaaagatgatcgagttatcaggtcagcctaagaacagtcacgatctcatcgttgatgcagtccgctgagcacaatctcaacacagtgacgaggatttggatatgcttctggatagatcccctgcggcttatgctagagagcaagggtggtctgccggtttacttggaaacgcagaagccaaggagaaaaaggccaagggagatcgaaccgctttcgaagtattcgctcctcagcttgcagacagcaagctcgacaatctgttctctggagaagctgcataaagacgacaattgtacagacggacagtatcggttgtattccttaaataatgaatcttgtcttcacggtacatacgaaattgaaaaacgtcatgctcctttcaagtcgtacttattggctcttagagacgttatctgcaagtccaagtcgcgattgtcaatctgggctaacaaggtgcttagtgccaagagcaggggcacagtccaaaggccgatgctggtccatgaatcgtgttgtagatatgctgccacgggagctatggcgtgccatagcaagagaatacgaatatcaaggtgcagacgatgggtgggattcgactgtcgcagtcgttgagaaaggattggcgagattgtcgtttgcaccacgagtagagggatctggccagatactccccataaaagacaaagcaccgttcgatcgatacgagagttggccgaaagatgggataccaggaacagtataaacctggcccatcaatttgtaaacaagaccgactgtatcaaaccaagctgttgcgatgcttacgaaatagcagaacaaatcgtcaaggcaaacagcaccgctgccctgcggtacttttgctggacatgtagggtttccaaacctgtgataagacgatcttgctctgcatgttcggtgaattttcagcttggatagtgtactttggtccggcccatatactcaccttgatcttccagagcttcccgatctttgcagaggtggctcagcctgacagatcgaattaccacgtcatgcttagcgacattctcgactcacctatcagctcatcgagatcctgcgatattgtaggcgacaccgcatcatcttcagcttgagctgcgaagatccgtctccgagaactcatgacatccaactgagatcacgatcttttagtataatgtgtggggcacagtacggagcacgaacatgacttatagagtttaggcatgatcgccggtccatatgtacatcttcaaatcgcgactttttgtttatgatgtgtcgctgatggctgagcgaaaacagtcgaatctcgacacgtcatcctgtttatcagactgtttcagatcatttgctttagcgtttgcaatcatgcaattacgctgtccctttgtttcagtcagaccgcctcgcgatcgaacctctcagttccacagaaaatcgttcgcatgaacaattccactgcgatagtccagccggtgaggaattgatacaatccgaaaaacacgctgagcatatgtaacgaggcttccagtgcacgaaatctgtcaaatgaccgatgtcaagaaaaggcggtcgagcgcatcctcggaaaacaaggacgaaatttcccaggtagaagaacacgcaccactatccaggcgggatcgtcttccgttcgcacagaggatcaccctctgtatctatagaatctcgactgccatgctgttgatgatgtggatctacctaactcccgattctccctcggctatctcttctcttattgagggccccaacgaagcctacatgagtctactgtgcgagtctgcacaaatcttaaatcggtcttggaacgttactaaagccatcatggccgtcagtgagctgtcaaggacagcggtgctcggggtggttccatacgcactgtaggtttaagggatgcctgaacaatgccacacaccgtctcaccacatccactgctcctcagcacccatacgaccaaatcttggactcatcgctatgacccagctcgctctggggacatctgtgttgtggctgtggatcgctttcatggatctgctggcaatgttcccgtcgaaacagaaggaccccgatcagcgctccgagagatctcacaaatggtatcggttttggaagcatcttcccagtctgagaacattccaaaatacccttagcagcctagtcagattcggtgaagctgtgggcgtactttgtgtggcgattgtctgtatcggagtcgttgcgatcgtcatcataaccatggacagctcggaaaaaatggccgttggtgctcacagtcagtttatcaacgctgagatgcgcaatctgcatacgctgatcatgcacgccacaatagtgagctggttgatactttacatcgccagccagggtatggctcctccagcgcatgaggtagcgggcgagaagaggtttctgaggtgggcttataagatctggttcgtcccggcattgctaccaagtatattatctatcaggcgttccaagagaaaggctcaaaggcggagagataccgagcatacaatctagcgttgaataaccgatatatcatcatgccgtcgagtttgaaatgcctacaaccgtaaatgcgaagccagaagagaagagtatgaagaggttccgaaccccgatggtattacaacgacacgggcacctttacattggaaacaactatcagagatctgcttatgccaacgatcggtgtcgaagaaaaaccgagacccactccacaaccgtcattagtatctaacggaaccatattcgagcccatcttgcttgtttccgttgttccagtttaattcgtcaataggaacggcgtcggggtcccgcttgatccatccatacccattagggtagatctgggcctcattcgtgtgctgttgcggagccatctgggaatgatggtgctgttgctgttgctgatgctgatgctgaagaatctgaggtggtggcggcgtcgcgtggtaaacaggcgagctaaacgaacgagtcatttctgttccgtaatgccgcacggtcgccgcgcttgatggtcgtagaggctgtggcactgctaccgacatgtgctgtgaaggtgcttgttggtgatggtaaggctccgatactggagatacctcagggaaggaggggaaatgtccgggtgccgaagtcgggataccaggatgggcaccaggaggcaagctcatatcacggtacccataattgtctggcatggcgatatatgagacagaagcctgttcggtagatgatcgatgggtctcgccaggtagacttggcgatcgaacgccttggaaggctggcgatttgctcggttgcggcgggtaatgagattgtactgggctatgcgagtatggatcataccggcgggacgccctgaggctcgagtgattcgatcgcacactgctatccgatgcctgccggatcatgggaggaggagcgaccatggtcccggtaggagctcgagctaggctatcgctggacgatgaagccgcgtctgaagcgtactggctttgttgttgttcgaaatagccaccttgcgggtaggacgagtaaccagccggacttatgggcgtcaagacgcccgcgctcgccgtgctaggccgactgtaatcaacgtcgccggtcgagggtccgtacgatccctgggacgccccggacataggaactgccgaataaggagtttgaggctgcggattactctcctccagctcgcctctttgccaaaaaaaaccgacgtaggcccggtcagtcatcgccatggaagcggaagaaagccgacccaactcacttgtactgcaacaatccgtcggggccgatatcaaagacaggcgggaaccgaaagttttgtttttgcatgtattccggactgatctcgagcgaaacaagctcagagatggatgaaggggtgcgtaatcgtccattcaagacgtcggcgactgagtagtacgacaccatgtgttgcgcgaatccattgacgttgacggacatggtctgtgtagatacccggtttctaggttaataagtccacccgacggtcagaattttcgaaaaagcatgactcgccttttttacaagtccaccatccttgaacttgtagctgtttgttaaacttccaacgagctgtcgctccctgttcttgtccagcgactctgaagattgaccgtcgcttacgcatcgctgtcgaacgacggtatagtcaagaccggtgatgctcgccgccgagagtcccggtcgaccttgcgatcccgctgcaacggtagtggcttgcttgttcggatcctggtcgttgccgttgcccgaattccttcgcttatccgtttcccgatagacctacgaggcgcgagtccagtcggcaaggtgatcaacatcggtctgccacacggtaccactgtctcgctagcccgccggcttaccagaaaattgcccaagatcctactaggactccataccaatccgtccgtccatcgcttgatcccgctctcgtgttcatcgaagacaaagacggcaccgctctgcaccattcccctttctcgctcaatgagccgtcttgtaacccttgggatcatccctctccgagcagcctcgaagacgagcaaggcgtcatatgtcgtctcgatgtacccccgaaacggtggatcgagtgctggtggggaggcgggcggcggcatcgagccggagtgattggcatcggaattcatatcggtggaggatcagggtgtaccgagggatatgaaggctggatcgacaagtcgtcggaataccaaggctgacgtgctcgtctagatgagtttggcaaaccaacaggtagtaaaggtagagctccggtttgatcgtctagattctagcgagatgagcttgtccgtagagtttgtcgaagtgaaaacacccggcagtgtcctgtgacgacgggaatatataggttttccgtctcgaccgtcgtcgtgccgtttgatgagctgtttgagcgtgtgattctccgtgccgtgtcaaagagcgtgctttgcgatctatcctggatgagttttgtcggtctcgattggctgtcgctgggctactcgacgggtcagctagcggttgcgacctagcgagacttgttcgagtggattgatgggaggagggtatgcgaagatgttgatgggctgtgttggtccggtcgttcgtgcttgatccttgacgagacgagccaaaagacgtctgacaagctgacgggttgatcgggttgatgatgatgctcccggtcccgttccgtcttggactgataaatgggcgtgataatatgtcgtttgattaattgttgaacaattaaactttgtcctatcctctctcgctctctcgggttctttcgccgaggtggatagctgggtttgatcgcttaaaatatagagttcttctctccacttgtcgctgttatcactcggtatccaccaaacgacacgttgtcgccagcatatgtatccctgtgctcaaactggctgctgtgctctcggctggaactaagtccttcgggagcgaggtcgaaaaggaaaggtcggtccggtaacacgttgcccagaatgcgtgcggcgcgaaaaagaaaggatgtgctggaaaggcacccaaagcttcccaaacccgagggactatcgccgtcgtacagtcgtcgtttattcaagacacgtcgatggtcgttgtgatgcgaaaaattgacgagcagcaagcagcgaacagcgagcaagagatgaagagacgtgaatggtattcggggcaaaggggaacaacgagactaggggattgatgggatccgcctttgaacgcggtcgggcttcgaccttcggctaatccgtctaaggtttagggggcactagaggagactaacgggaccgtgaccggcgagcgaaagccacggcgtgaggaggacgggcgaccgggacgggatcctcgaggaggatatgaatggaattggatttcaggccacgacccaaaaacgcacagttgatcccgtacttcgctcgctttttcactcgcgcgtcgcacaggcagggctgggttcagccgtgcctcgaccaagggcagtgatcgaccgacatgtcacgaccagcgacaagcgttcttgccggggaaagccaaaccgtgtgatcccatcgaatggttcacttcgaaggagtccgcttcaatgcaatatctgacaggcatcgctgcgtccaacgtcttccagttatgcgaatgaccgagtgaaggccttgttcgcatcgggaaaaccccgaagtaccagttcctgataatgcggatccatttcctgcaacctccacttttttcccgctagattcgtttatctttttgcattagctcagtatgacagtcgccaagaaggtcatccaaacagctgcttcagagagtcacgggtcacgggtcacgggtcgagggaaagatgtgcgatagcaagtatacgagcggaatggcacggtaaattgagtccggcgtagcgagctagaacgaagtgaatgacattctgcgaactgcttggtgattacgtagtcattgctataatgatagcgacgacgcccatcgaccatatgccatagggcgggacaaggaagacagtcgtttcacagtcagatggtaacctcgacactcaccttgtaaccttgcctatagattccgttcatccccggcgtatcgcttcaacgtggcttcttaccgagaacgtgcgtctggcagaccgaccgaatggacaggataatatctctgcagatctccttctgttccacgctgtcaacgagtacaccaattaccgccaatctgtgcttataaagtcttgtagcgtggtcaagtattgggtcgcgtaatcgtgtgtgcattcccgctggccaatttaaacgagaatcaatcaatcacgtcgatcataatcttctatctggatctgtgctcttgcgggtcctatcacggccccgcgccggactgcgaatcctaatcgtagttcgatgtctttcacagctcgaccctgcgaagctgctaatcgaaggttaccccaaggaattcacggaacgaaaacgcaaaacgatcgagattcccggcgattgagtagattcaggtcgcaagcgccttctctcgcgcctgcccctacagccagacgccttctgctctcgcggatcacagatcagatccgtccgcaggaccgacatagtgggtgaccgaatcgtcgtccgcctcgttctttccgtctggggttatcgaaggcaggaaagctctttgttcattgttcagatctggtcgcatggatcggcacatagtttgaggaagcggtgatacaccttgtctttctctgactgaggtatcatgcactcatcgcgcccgcggaatcccattgtttgtattgctccggagtggtgaacatggatctgcatagaagactcccaagtagggccaggtgaaccggaccgcactgagctgatcgatgcttctaccgtagggtagcaggcccaacgaaacgtcacgaccgcaggctgaaccaaggccgatgaactatcttggcggggagtcatctcgcctgcttgagcgcaagctgaaagatgctcaggcaggctcatgactggatgctacctatgtgtatgcatgtctgatcgtggctcgtaccatgtgtcgaatccgatatcagcgcgcaaggcttctacccccgtcaatcgagtccatcagaagagagcaactgactggactgactgcataaacatatgggattttcagcctggaacatcacgtcgaggatcgatcaggaatcatttttacttccgtttcgagcgcgaagaatgtcaggctccaggctctggccgatgcgaagcaagaccgaggtcgaaggtctccctggcatcatacctcattactgttcaaatgggttatattcgcttgataaacaagccaaccatcgcacagtattaccaagggcacactcgtagacattcggcatcgctctcaccaaaatggctgaaaaacaaatctccttggcggagctgaactctggacagctgcaggaggtcaagcgacagttggaggaggtaagatcatgcttgcccgcttgatcagatgttaccatttctttagctgatcgagcattggcaccggcgtgtggtgtcacatttaaattattcaggaaatcgaacatctgtcatcatcctttggatcgctccgctcggcacaggcgaaatatcggtcctgtgcgaatgacgtcgaggagatgaagcccagcactaagggtacatactcgggtcaagcataatgatgctggattcaactgaccgtaacgatggaaactccttgatataggtaaagcgatgctggtgccgttgacgtcttcgctatacgtaccggggaagatcacggaccctgaacacgttgtggtggatatcggaaccggctactacgtcaaaaaggtgcgagctagccttgaatgaactgactggaagtttccgaaagggatcgtcgatactcatcgccttgtctggtcttacgtttacaacgacagtctcgacaggaagcgatctcgctctatacaaacaaggtcaaattcgtacaggagaaccttgacaaattgcaagcgacgatcgagcggaaacaggacaatcttcaaagttgtgtgggcatattgcaaatgaagatgcaagaggagagacagtctggcgtatcgacgtgaggaaacggtttgaatgaagcgtgaccggttatcgaagcgtatcgctgggcaaggaacggccacgctgcgtctcgctgggacgcgaaggcttgcatatctgactagagacacagtaacactatgatcgggtctccacatgaacggatgtaatgatgtgacgacaacctaatgaagaaggaaattgagctcgaacagttagcggctagcagctagagcttgcacggaccttgaactattcataatgtccgtggaaactgatcgttccaggctcgggggttttctttgcttccgagtccgactgcttttctttcgcgtctgtggccgaccgcagtccagtccaattgagacccgcgtaaggcgattttcgtattgccgtctcactttcattgactgatcatgttaccaagtctgcttcgctttcgatgacactatcgagatgggttggaattacctgctacgggcaactagctgttgagctagtagtgatgaaacctcgaggcggcgaacacgggctgtgtcatgtctccaaccatttttctgaggccccacgctcgctctgtgtctgtctgtcttttggcgttttttatcacgcgcgcgtgggcgtgtatttgtttcctcctcctcctggcgccttgactctagcgaccatgatgatccactcctgggatcatcaaaacaatcggggttgaccccggtgtgggtgttgttgttgtgacgatagagaatagatgatctatgattcatgatgatggtgacgatggtgatggtgatggtttcgtcgtccgtcgtcgacatcgtcgcgatgagacccgagacgtgataggcgagatcacgagaatcccagactgaacccggtaagggactgatagctgctattagggaaatagaaggcggaccatgtcagtggacgcgaagtgatcaaggttatgtcatcaagacatcatcgatcgcgagctccgcatctgcctgagccttgcagaagatctataggctatcgagatacaaggaggtctctcgcaatgatacaccgagtcgatgattggtcgatgtctcgattcttgcgtgctgatcgagcgcttcaaagatgttgaggctaaaagacttgaattgatggagatattcatcaatcagagcggggccaagtgaccgacagggaacaagctattcgcctgcaatgctcaaaaaaagaggcttgaaacgaaatgagacttgactcgatattgccacagacttggccaatcaccctcctcgttcgcccgcgcgaccccctcacgacacacgtccaaaccaccacgttggtgtttcatctcgtctcatctcgcgtcacgtgtctgatccgtgctaccctcggccacctccacatggaagttgctgtgaagtttctgtactaacttctgctttgggcacgcctatctccctttaaagtggcctttctctcggtctctggggctctgggcgaggttctcccccccccctcctttcgatcgacatgtcccgttctttatggatcgcgcgcgtggaaaatcgtttgtgcgccagaaaagaaagtgcacccactcaaagctgagacgcgacagcggatacgttataagtcgcaagtcgagaccgggagacctccatgatcaaataaaaatgataatgtcacaatttgattcgcgatacaagtatcgttgttgacaacagcggttgatctatctcgtgatcatcctcgattgcgttcaccataaaggaggtcgttacaatacgtgatctatcgagcagctcattcctcgctgtattcgacgagaaaagcacccataaagaacggcctggagagatctcaatccgaatcaccaaaagctttccgcaagatgtctacagtcgttcaaccctatcttgccgccaatccgggtcccgaagaccgcattcataatcctcgagctagctcggtgacgcaagatcccagccgatccgtcctcaaacaaaaccctccagcgcattcacccgagaatcccagacaaccgagaatgggtgccgcagtcgcctttcctgccctctttgttactcgtgagttggatagcggccaaactcgttgaaatgatgcatactgaatcgaagcgtgtacaccgggtcagtgggcagcttcatcctgttgctcctagtgaccctttccgtcccgatcatcaaaaagatttacctgttcaagatttacgtcgacgtcgagtaagcttcctcgtgacaacaagaggcctttgtatgattctgatgcaccttccgctgtgtgattcggggacagcttactaaggaatctcattagcaacggggagatacgtaccggcgttctgggatactgttccacaagtatcgcatcggtttcgctggatgctcttggactgtctgggacccaagtcgtcggtccagtcggttgctcgaagaccaaactcggatacgatatcccagacacacttgtgcgagctttgaacgatttgccgggcgttgacatctcaagcatcaatagcgccatcatcaagaaattgacctatgtattggttctattcccgatcggtgaatgggtcttagatggtaattacttgcgggaaagtgtcagcgggctgatggtactacggataattcagccacggctcttacggggctcgtattgctttgtacgctgatcgcctggctcttcagaagccgaatcgccgagatcatcgcgttcctcctttcttggctggccgctgttgtaggtccccgattgcaaagacgaaattcagtcggtcggacgtagcgattgacacgcaacttcgattatcggtgcctcttacaggttgcatgggtcagttggaacggttcctgagttcacgctccgcttgcaaaaccgtgcttgacgtcaaactcctttttatcagctcgcttttatcattgccatcattgcctttagcattgccaagcgacgtattaacgacgccactgatggcgccctcaagggatccttaggcaacggaatatggatgagtctggcagcagctgtaagcagagcgtctccatcttacaacatcactcttgagacctgacgtttgcggccctcagatactgctcacgttcacgatttgtcttacgtgctgcggaatgttcggatcttaccggaagaaaaaagtacaggtgcaggacggtcatcgagggggacttgcaaccatccaaccttctggtagacgccgtcatttctggaacctgtgagcaatattcgccatatttcgactaccaacggcggatatcgctgacctcagacattcgctaacccccactgtagagccgagaagcgccaggacatgttggaacgtcaacgtggggacgccgcggctccagtcaatcttgtttcgccaaacgcagagcaccaagctgctcgaacatgatgtgcaatccgctccagacctcaatcatccctttccgtaacgcgatgccagttctgctatcccggcgacgtatctttagctcaagaccgtgagaataaatgtatagtctcgcaagtcataatgtcattctaaggcctgtgttgcaccgttccacccatcttctccgcaagagactccttgtgtacctttctgagccaactatccaatacccgttcaaacgttgtttcccagccggggtcgcgcctcgcaagcgctaatggatcatagactataccgtccgccggactcttcctgccatcttggggcgtcacctgggcctttttttgagaagaagtcgggagttggcctggtgcgaggggaatacctgccggtttcatcgggatcgcacggtaaggaaagttgagaggaacgccgtatcgctgtttgagagcactgtcaagatctctcaagctcaattagatcaggcttaatctgcttgagcaagtctcaaagttggcttacgctccaaagcatcgtatattttcggctcgtctgaatgtccaatcgcgcttgctattcgaagcaaccgttgtttcgctcatcgtcgcaccgaggccaagagtgtcatagacctcgtccattggtacaaatccccaaggcgaagaagatcgctgcaggaaagcgttgagtgcgatgatgcaaaggtagccatctctgttcagcgtagggagccaatgtcagtgttccttgtcatcatcgtggttctgctagagaatgacaacacatacgaaagtcgatcgagcaaagcggctctcgagttgtcatcgttacgagacggtattcgtgacagcacgtcgagcgggaggtaatgtcccaggaatcggcgtgtccgttctgtaaggagattgggcattcatcagggcaatttcaggttccgtcaacgactctggtctctcaccaaggggatccacgtgtacagccggatcaagccaagccaaatcttggctctcagacgggtttacaaacggtaactcctgctctgatgtaaacgaatttcggcgagaattggcgttgctgcctcgagatcccgcgccctgaccaaatattttgcggtcgaccgcttgcaaccacgccttgatgagttgcccttcttctaggagatcaggatcgacggtcatgtcggtcctgtatagccaaccttctcggtcggccgcatttaggcggtcgtaccaagagtccttcggattgcccgtttgatcttccgattcagtgggaaagaagaacgacaggtcctcctcttcctcgctttcttccagttgaacggtaatctgtggacgctgagcaccgtcgtgcaactctcgggcagtgtcagactgcttcaccagagcatcatcgccttcctgtcgggataacgtcgtgttgctgccttcgatccttgaccgttcttctagagctcgtaaaccggtcaagacttccagcgcggcttttctgacctctgctaaaggatcttcttctgggatcggtgtcgaagccccgtgattgctaccgactgacccagtcgatgagaccgatcggggagcgggtcgcgagggagtagatagcgattgacgagctcgtccaagcccggacggtaccctcagagttggatgtgtcgatgaacttgtgcaaggtagcatcgatgacggaatggccatcgagtacgctctgacagatcggatggcatccacggaagccttgagaagatccagaacattgactggacttggggctgctgaattctttggctctgaatttcccaagtcttcaggtgtttcgaggctccagatcttttccaccgagcaaatagactcgagcgcgtctgcgcggagcttctctaaatcgattttcacgttctccactataggatacggcggacgagcaactgtcggcggcagcagaggcgaaggtgggagaggaggtgtcgtagacggcgttgtagaaaaactgcctgtggaacgtaatgcgtgtcctaaagccggctgtgttgcaccccttacattcggtctgcagcaagggttcatggtgatcagatgagaaacggccaggatcgtcgcagtcttcacacatacggctctttcgcggccaacccgaacttgagctaaggcgtgaagtgagagtataagtgttttgatttgagagcctgaattccgtttgtaaagtcggtaagcttacgaagtggtgctgaagatgctcgatgcttccgagcatgtgcacggactgccgtttgtctgcgctctttgcgaagcgcctcatctgcctttgtgcgagaccagtcggctgatcgactgctgctttctccttctcagtgatactcgcatgcatgttggggttcttgttctccgcctcgctagtggatgccacgcctgctaaacaagacggatcggatgccatcgagttggctgatgatggaaagttgaacgtcaaaggcgagttgcccttcgcttccgtgcccgtagtttcttccggtgctatcatggttgggccaggcagtgattatcccgggatgaagagcaggaagttggtatataggcgcactagcactttccttcaaggtagtagctagtagtgatgttcgggagattcgattgaatcatattcttgatcttgatctgggatctgacctgaactgagcttcgatcaacttagatgacttttgcttccgaaactcaatcatcacaacacaacgtaaacaaaaggttcggaagcaaatggcggcggtacatgttcacagtgatatctcgttctcgtctcccccgtacaaccctccttgacgtttgccctccttgatgtcgacccggcgaagcaggatgggcagaggcaaaactagcaggacaagcagaaaccagaagccttgccgtatatcccccgtgcgacccgcaatcacggcgatagccgcgggaccgagccacgaagcccccttgtctgtgatcgagaacaggctaaagaaacgagcatcatgcccctaaaagacgcgcaaatcggatcagctgaaagcccgtgtccttaaaatcgggtccgatttacgggaggtacgagttccgagaataccgaacgggatagcgtgttgaatggtccgaacatctgatgtatgcggtttgtataaggatccggaggccatgctcatcgtcggtggcctgcaaccgacttaccagaccgaaccacaccgccgcgcagtacatttctgactctccattcagggcagtcagaccccatacgcacatgcctgcaactcccaagacactggcgaccaggagcgatttggcggagatcccaagtttggcttgcacgagcggcgtcatcacggcagaaaatatggccgtaaactgagtaaggacaccgactgcgattgtctttggcgccgacatccgcaaggtcgtcttggcaaacaaaatggctaccgaggtcgtggtattgaacgctgtgatgagcatcgccggttaagtttgaccagggaccgatatgccaattgagacttggaatcggcttaccatcagctagaagtgcccaagagaacagaaaccagtacaactgactgagccgacgtagttcttgcttgttgaagacctgtgcgactcttttccagccttcggcaactttgctcttcacattgacaggcgatgttgcatgttcggataactggggatttgcagatatctgctcatggcgctcggctgagatatcgcttatgcggtttcgcctggtcggcaaccacgttgctgccggaaacgtaaagatggcccaccacagaccggtgacaccgatgaccgtgctgagcgattccaggctgccttgactctgcgccacagggataacggagaggcacagcatcgctacaccagcagcgtacccgatggctatgcccatagacgatgtccgagtggtcactagggagacagtagcgatgtgtgcttcttcagtcaggcgactctgctcttccagcatgtgcttgttggtggacgagtccggatcgagggcttcagccgcggtagccagaagcgagacattttcctggtcatcgtacgagtccactaatggttcgactggccccggacgctttccacctggtctggttaccaaagcagctgaggccatgacctcggggtcgtctcttaccaactgacctaggtaggcattcaagcagacgaacgagtccccaaagcaggcaacggcgattatgctgaaaactgcagcaaggtagacggacccttgcctagccgtgggaagaaagagatataaggctgtcgccagcgaaccgatccatgcgaagctcaggagaaggcgttttctgtattccactggtgcagggtacagttaagcgacaagtcaacccggtcgatggtgcagccccgagtccaccactcacatacgtccgccagcacacttatactgatgactgataccgcttgaacagctacgcttatggatttgactgacaagctagagcaagattggcaaggacccgtgagcgaccgaaggcattgatcgcgacgagatctatctcacctgaatgacgctgtatcaacccaataccccagcaaggcgacgtcgcagcttcttgaattctcctgagaagtatgatttgcagtatccgtgcaagctatgacatgctcgggaccataaagaccatgagtccgagcaagttctgcggatgtcacggagtagtgagctcacgttgatcattaactccctacgatgatcgagcacttgcgttctaagagcatgggaatgaagaccgcagccgacaccaagctgaacacctcacacgcccatgcgtaggagtagaaagcgaagagatgtcggtggtgatccgttcgtggccgaatccaagaccaagcggaacttgctgttgaggtgtcttgcatagttccgctgaccttacatggcttgcatattgagtatctcgtactaccgggcaaggggagtagatagcacaagttgcaagttggtgagcgtgaagtgatgggtcaagtgtcgggctactggagcagatataactatgtttgattagatcctgattcgtcatgagctcgcgatctcgcgactcgcgcagacagggagggccatcgaagtcctttgcaagacatcgggtcacgctatgggcctaggagctttgggaacagccgaaacgagcattcaaaaaaaaagggggacgaaggagagcggtgtatgcatgctattattctctgctgaatctccatcgagactggtcacgatgaccggagcccctcgagatacaagttgcagacgctcctgtgcgaagtgaatcacaatctccctcaacctgtagcgctcgctgccttcttctcttcctcctctgcggtttcgggggtcttcgggtctgtatccgcttccactgcaggctgattggcggcaggttcttctgaagtggtcgtttcttctttcgtggtattcgtcaagggttcattcggtgcatcggtagaggacgttgggttggtatctgtcgaggcgaggcatagtccgggaggcggaaatcgtcaaaacagtgaccagcaagtccgtcgaagcggagagggacacacacatgtaaaacgagtcaaacgaaagggtcagatcctcgtactttcgagtctgggacgatcaaacctttcccccaaacagacccttgactccgcgccacagaccgctcagcggtccgccatcgtcagacggacggtccccgttgtttcgcggagactcgttcgtagtcgacaatggtgaatcggagcgagggctgggagaaggaccgccggaggaagggctagagaatggactttgtttcgtaccgttaacagctgaatcggtgggctccgaaggtggaaccgtgctgaagtatgatgggcgtccctcgacgtcgtccgcaaaggcctgcaagatttgcctttgtcgcgaagtcaatgacctgatggaacccggagcatggcctgttagctgactgccctaccggaacctcgatcgtcgacttgcctcggaatgacaatcttccagttgacgatgagatcgcccctttccctcccgtaaacgctcttgacacctcggcccttgagcacagcttcttctccatccctcgtgccgcccttgaccctgacctcaacgtccccctcgagcgtgggaattcgcatgcgaccacccaggagagcggtatgcactgggacctgcgaggtgtggtataaattggagccttgacgacggaattgcttggacggttgcacgttgacgcggaccagtacatcgcctggcgttccgggaccggacaatgggatatctcccgcggtgggcatccggatcttcatgccgtcctcgataccggccggaatgtccacctcgaccgtcctcttctccttgacccgtccaacaccctcgcatcctccacatcggtcaccccgtcgaacgacgcttccgccaccgccacaggcctgacaagtgctggccatcaacatgccctgaaggctaaaggtctgctggccggttcctcgacaagtggtacacgtatcacgcttagcaccggccttgagtccgctacccgtgcacgtcgagcattccacaatcggagtgatggacaccttcttcttggttccggcgcacgagtccatgaaagagatgctgacgaccgtttcaatatcttctccacgagacggggcccgaggtccagctcctccgcccattcctccaaagggtccaccccgtccaccacctcctccgaaagctccgaatagctgttcgaacatgtcaccagcgttgccgcccattccacctgcacctccgccaaaggcagaaccaaagtcctggaagccgccaaatcctccgccaccaccaccgaacggatttctaccgaatgcgttggggtcgaaaccaggttgctgggaggccgaaccgtactggtcgtacgcctttcgtttgctctcgtccgagagcgtctgacgggtggaaaagtagagatcagcatttcttgcaatgatatcgagatgttaccggccgacggagactcacatcgtaagcctcctgaatctccatgaacttttcgtgcgcagccttgtccttattggtatcaggatgccacttcttggcgagctggtaatacgtcttcttgatgtcggcttgagaggcatctttcttgacgcccagtacgctgtaagggttctttgaagctgccgcttgattgatccggctggtatggaattgtctctatcacaagtacgaagtgagcagcgtccctcggtcaatcgagaacgacacacatatatactgcgatgacacctacgcttttgccatattgacgctctgacatgctttcccgcagatcggacatggaagcccgacgccccctccaactatgcagccgactcgcgccagagttggcagcatgtgacgaaagcttgcgactcgccggcaagtgaggtgaactacatggtagcggtgtcgacgaggcgttcgaagaggaagaaggcaccgccagaggagcggcttgacttgggatagccgagaatgacctgagcgacgctacgggaagacgaggaggcatgctttgacgatttggtgtatgtgagaccttgatggtatggcacaaatgctactgctttctatatttcctgtgctgtgtgataaatgtgtcgttcgttaagggtgttgaatgcaaagcaggcggacgattgatttggaacgagtcgagccggtgaggaatcctctagaaatccaaaatatcccctgagcatgagctatcgatcgttcagctgctgctagctgctagctgcttgatgggccagggaccgggcccctttttgccgccggacgcgcgtaaaatatgggaaaaaggccaccacccaatcagaagcgcgtcatagatcatttgcccatttagaaccacaagtcgataacctccatcatccagttttatcaggtcaggtcaatcacacagctgcaagatcactcaaggggagaatgttgcacaccatggagaagcacgaaaaggttgaatcatcaaaccgtgggctcggaagcccgactgaccgcttctctcgatcagtcatgaatcagccgtcgtaatgggaatattacgatgcttttgcgcatcgacttgctaccatttactcttgcctatgcaagactcactcccgtgatgcaacatgcaagatcaaaggccatcctcatgacccgcagcaagaagcggcatctgatcggtttctactgtttataatcctttaacgaaaaaaaggggcgatccagtggcgcatccccgtaccgagatttaatgttacaactcgtggtcgagtaatcgtttgacaaaggatgcattgtattggtcggcggggcatcgtcgtaggtcgacggctcggattcttgttgtaccgaacctgtcgacgaacgcgtgcacccaatccgttcgtgttccggaaagctcgcctcatcgctcccgattctattgttcctcctcctgctcccggtagtatcgcttcaaccactcggcggcttcctcgtattcctcctcgacttcaaccaggagttccttgatcttctgcaacgcctcatcgtcgctcaacgtcttggcagcctcctcgtcccgcaagttgccataatgctgcatcttttcgcaagagtccttgactttgctcactccgagtgcggcggaggatcccttgaggaagtgtcccagagaagacagctgagggaggtccttcgattctctgcacggacggcgtcgaggcggtcaaccggtcaggttgactagtccgcacgatgttccggggcgttaccagcgatgtactcacaaggcagcatacatcttctcgaacgtgctctcggcctgctcaaagtagttccacacgatcccctttgaaaattcgtgaccgcctccagcaccttcctcgtcatcctcgtcctcgagctcgtccatctcaaagacctgaccgagaatgtccatgtcgatgataccttctggatcacgaggaggctgtatgtaccagaacaagtcgatacgcatcattcgtcagcgaacgtaacgaggaggtttgtcgacgcaatgtaaatctgcggatgctaacctccttcttgtccttatatgatcgttctaccgatgcacctgcttcactcctaccagcgacttttgcttcggacgacattggccaatgtagacgatgtgggtttaaagtcaagtgggcgtggctgtagcagagatgtctggttgattatgaccggagagaaggagggggtgatgtcgattggcaagttgaattgatcgacgtatactatgcggacgaggtcgtaatcgtagaaatcaagctctttcaagtcgtcaagaggatacgttcgagggtggcgaagacagtggccttgaggagaggtagagctttatcaagactcggcgatgatattgtcgttgatccaggggcagatcctgtgtcacggtcctaacgatcaggaaatcccaccaggaaagtgacagacctctgcgtcgagctagcgggagggtctcgattgtgagagaagaaacataggcagagggcgagcgagggggcagggcgtcagccgggcagcaggcgggtcgccacaggcattgacagtgcggcaagcacggcataggggaggccggcgacgtcaaaggaaaactgtcgcgtgtggtggctgatcagacatgcgccgaacaaccccgccccctccgtctcaccccgtgtcgacgatcgtgacgtttctttcgccaatgcccgcgggtttccttggagggttgcacggatcgtcgtcatctccttacgcgtcatcgtgatgtcgtcagatccagtgagaggcaaatctgtgagctcagtgcttcaaatctgcctagattgtcatgactctgctttagagccgcattgtttacttcttcggtagctcgcatcaagtgacgatcgagcgcgagccagagacggcgggttgcctaggttcgttcgcatctcgggggttttccccctgtgttctaacttcagcctccgaccatgcgacgtcagctcatgacgtggtaggctgggcgccgcgatgaccacgacggcacgacacgcgatcgcgagcttccccgcctaataggacaaggtttgtccggctgatccgaaaaaccatccggcatggccggtctagctggcgtgatcttcttgacgacgagtgctggactacagtagtatcctcgaactgcggaacttgttatcgtgcgtttgcatcagtagtagtactcagcttctgttcagaacgattgtgaggatgttacgccagagaccctttgggtgaccacagccatcaacctgatcgcggtcagcaacatttccacgcgttgtcgtggtctcgctgacgcgtttcaggtcgtccgaacttgatgtgttttcttttctttttgttcttcttgtcatcaaagggtccaaaggatgttctcgattttgctgccaataaaatatgccaaggatgctcccatgaatgtggacatcgagctaaaaaatgtcgatatatagcagtcgcgtagtcgacgatagatttattagaggtctctatcggaagggattcggaatcctcctcaccagagtctccagccacctgataatcgcaagtttagctataacgatcccattatgccaggtgtcaaggcgatcaacaagcggcttcagtatggacctcacgtcctcctgcttttcctcctggcattcaccatattcatcctcctgtgagacattatggcccatctacctaacatggggtctcccactgatgaaacaatacttcttgtagcgtcttgatcaccttttcttcaccctttatcacgacgatctacttcctccgggcaggcctggtcgatttcggcgcatttggatatagctcccccgggtttcggtcggaagacgtgctggggtacgaatatgggcttcaagtactgaacccgcttacgaatgccatgatcatgtggggtatcggtcagtctacctgttgcccgtcgtagaattgaagctgtatacggttcactcattcaatacttttcgtgcgatgttgcagcaacggcgtttgcatttctcgccctcatatctatcataccacttctatgggttcacgatagcgcggcattgaatgctgtagccaacaacacctttttcacctattcctcggtaagcaccaattcgcttcgcacacgtccatcgcattgaggctgatctaagcgatttcaaatgccactagtggattctcacgctgatcgtgttcatcatctggccgatgagcatactaggctggtcgatcgctcaacgcggtttcaacctgtcagaccccaatgtcaatgcgaccctagggtaagcacaggggtggtaccgctctcctcgattttcgcacacgctaacacaaggaatgaatcactggcagacccgctatatgggtgggactcgctgcgtggattttggtgatcatgtaagtacatacgtccgaagctgcactcgatccacatgctgacctcgtatcataccctcgcagactgcaggcgatcggatggcctgcagatgttggagatggccaaggcaacggttactaccactaccgtcagacgactagagaggtgaccaggccgcgcgtctagcggtattaggcttcgtttacggctcctgtccctttgcttgccttcattcatgcatttccgatttcttaagacggtattctgctcgattcgcgtattcgctctgggtatacaactgtgatcatctggcaatactatgtgcaaccttctggttctgaggacgtattgacgtgttacggtcgagcgacctcatccgatctagctagattcggcgatcctgtaggtttgctctcgctccccagtcccacccgagtttcctccccgaccttgctgcacggccatcttcatctgaccgacgaccttgctaaggacttctagctccgcctcggcacccagaccgaattcgtcgtctccatcatctccgaagcctcctgaaccaaggtgaaatcccatcatcgaggaagagaacgagccgacgtgcgtgcgatgcaaacgcaatagtttcaaggtgttttccaacccgcttcgaatgtccttgaggttgtcaaccgtcatttgggacaaggctaggtccgtcttgagcatctcccgtttcgacggttccttgatcccgaccgccacttccttggctacgtcgacccagtctttccagcgaggcgcctcccttacttcccaacccagtcgatgagactcttccatcatctcgtgcatcaagccgcccccgatcgtactcgcccgatcggcagccggaagagccttttccgtggccaagtagagcgcatcaaacttttcctgcgtccgtagcatgaccttgtggatcatggcttcgagttgtttcggagtgggtttcgggtcggatgtgagcaaaagccggttgaggcgatcgaaatcgttggcaatccaggaaaatgcattgttggtttgggcatacaacgagctgtgggaggagtttaatggggagatcagtgtcgaggtatcgggcggtctgatcgggagacagcggctcacgagatctcgtctgacaagtcccgactcatgtcccctaatgccatcagttcactcccgaccttgtccttgtcgggaagattggacccgattttgatggcagatgctaattcccacatcctatgaaagagcgggtcaatgatggttcttcacgcaaaagggagtgcttgtatcggtcttacttggtatggtacagaccgttctctacgcctccggtaccgaggctgatgacagactcgaaaatgttctgagcattctgagctacaaatttcccggcaagatcagcttaggatgatgtcaaaggaccctcagtctcgccagctcaccttctttatgcagggcgcgagcgaccctgcccacatcgtagtctttctcgctccgtctcctcgagcaaatcagcggtaggtaaacactaccgcatatgctcccgacactgggtagtccgccccgaaggaggtttccaggggtcgagctcaagttgggtaggcttggccaggtcagaccggtgccgttccccctggccaaattccacaacaccttgagtgatccaaagatcccccacttgacccgagagaggaggaagggaacgagaaagtacactgcaaggagacccagcccgatgaggacgaccgagttgacgacgtgggcgaggatcggggaaagaagggtggacaagagtcgattgagaaggtcgagagggacgagcaggaaggagagcgtctcggccaacgcaggtctcgggcgtgcttgacgagccgggggggctttctgtgatgatctcgtcggacctgacgttgcggagctaggcgctgatgcctttcgggatgtaccggctacgcaaggtaaggaaacgatgatcaacgttaaaattgaaccgtaggtactgaatttcaagactgaagcgtacctggcctgacaacctttgcagtcctgtttttcggttcaacatcttcaaattcgaggtcgacgtcgtcgtccaagtcatgctgttcttcttccacccataccgacctgttcacggtcttccttggagacgaggtggatgttccacgtcgcaacttgcgggctcttgggcttgccgcgtatcggtgtggtgacggtgaggtcatatcgcaagagagacacaagatgcaccagagttggatcctgacctacgagagcatgaggcgtatcatgcggagagggagtacgatgatatatcgatgtactgatgtagagaggccaagaggcaagaggttggcatttgctcccataaaccaaccccgttcgttgcctacgtcatgcatgcaacaccaagttatttgttgttgtttatttgataaacgagggatctctccgataggctatgacgtgtcagtataaacaatgattatctgactcacattgtcaacaaatgaatgatgataacctcgggcgaggtgacgaaccatcttgcatatcgctagaggtgtagcaacgaagcaatcaatcaatcccatattgtctattgattgtggtcaataatgctaaattcatcgcaccaatcacagtgattgtaagaatatcacaacgtgcctatagaccatctccacataacacccaggccatgcctgcagcctctccaaagagatcgctagagcccacaacggccgaatcgtacgagctccgtgacatcgagcctgacctggcgcggcatcaaggcgaagacgatcaacggcaacgcttgctgagcaagacgtccgatgaacttttggatgaagagatcaggcagctacagggtgaggtcgatggggacgaaccataccagccgagaaagagttcggagagtcttggagatagggattatgacatggaagagatggtcaaccgggtaagcccgttgtcggcgtcacagcgcatctatccctcatatacgctaatagtgttttgcaacataatttgtctcggacagaccactccgaataccgacgacccaaccctgccctccctgacattccgctcggtctgcttgggaaccatcttttgcattctgggtgcagccgcgagtcaggtaagattatcgatgtgccgtcttcgtgatggcaaaatcccgtatcttggcgctcatcgtgtctttgacatgcttcaggtcttctacttcagtgagtttctgtaatcagccgggtagcagacgacgcctgatatcgagactactctccgacataccggaacatcagaatcaaagcaagttctcccacctcatcccagctcgttcctctcgtactaactgcgattggatatcttgcatgtcaaacctctagcgctccatcgttctccgtctactttgtcatcctcgtctctcacccgctcggacacctgatggcacggtacctccctcaacgcaagatcatgggcgtccagctgaatccgggggaattcaacgtcaaggtgcgttttttcttgtcgatgcggttcagcggacagggacgaaactgatagcttggcgcatcgtaggagcacttgttgatgtgggtcaccgctcacgacgttttgtagtcagcctgatggagccgagccatcccacaaattgatcacagcgcagtcatcgcctcttccggtggtacctcggcttatgcctctgatatcggtgagttcggccagatcctttaggtatagatgggattactctgatggcgcggtgcatccgggattagtcgcgatcctacgactatattaccacgagaaaataggcgctctggccagtattacactgttgatcaccactcagtcgatcggtttcggcttggcaggtgattcttggcacattgattcgagagtaggggagctatgctaatctcgctccctcgtactttgtcccaggtatgctgcaggaaatcctcatcaagccgacatcgatgtattggccggcgtcgctggtcttgatccagttgttcaataccctgcacgacaagtcgacctcgttgacgaggacgcggttacacatcttcacctatacctttgtcgcttgtttcgcctaccaggtaggccgggatccagaaagatcttgaaagcaggatcgacagaagttgacaagtcatgcttgacgcagttcctaccaggaacttttttcccgacgttgacatccatcgcaaccctttgttacttcaataatcaatcctggttgatgcgtacgctcggatcaggatacgaagggctcgggatcctcaattttagcctcgactggtcgaccatcgggtacaatgggcccttgttcaccccatggtttgcgcagctcaactggtttgcgggcataatggggatggtctgggtgatcatgcctatcatgctcgcaatcaacttctggcaagccgctacctttcgcccgtcttgatcgttctcgactagagaactaatgggcatgccgattcaatagggatgcacgggagtttccctcgccgacgtcgtctcatctatacaataccacgtttcagccattcgatgtgatgactgtactcaacaaggatttgtcgctcaacgagacgatatgggaagatgtcaagcctctgctgttgacgccgtacttgtgagcctcggcctttgattaggacagggcagtctgacttgagaacgatcatcgcagcgcaatgtcgtacgcgctgtcctttgcagctctgacagcggtcctggcgcatgtctggatctggcatcgacaggaaatttatgatggtaattgtccgaaagatttctgcttcatccagctggctgatctgctccgcacggaaacagcattggcgaagcgtacacggcatagcgatatacataaccgcctcatggaagcatatgacccggtacctaattcgtggtattatggaaccctggtcgttactttcttggctgccggtaagtcaagtccgttctacttattcggttacatgagattgatcttgtgattttccacagtggtcttggtagagagcagcccattgcagactccaacgtggatgctggcattggcaatcatcgtcgcaggtgtatttctggcgcctatcgggatcattacagccgtcagcaataccacgatcggtctgaacgttctcacagagttgtgagcatctcagcaagcaagattcgacttcacgtgtgctcatctgaatcaacctgctcccagtattggtggcgtcatcatgccaggaaaaccgatcggcaagtgagtctttttctctttttcacacgctcgtattctcaacatcagctgatcgatactgcggttctgcagcgtgacttttaaatggtcagtcaagtttcagtgctaggtttgctggcgaagaggtggcttacgcacctgctcagttacggctatatggcgatggcccaagcaatcgctctcctgagcgatcaaaagttggcccactacatgcatgtcagcccgaaaaatgtaggtgtctatcacaactgttcaaggaggaaatcaaggtgctcacacttgggcagtatagatgtttattgctcaggctctaggaacagttgtaggctgtattgtcaactacgtcacattgacgcaggtcatcgactcgaagtatatgtacctcaacgggtctaagatcgaccccagcggtcaggtgagagcgaggctgtcgttttcgatcttctcttgctgactgctgccaaatacagtgggatggacgtaagccgcagatcttttacagtgcatcagtgtgagtgagaagaaattctgcctcactgcctgtactgtcgataaccaaccgaaatcgcaggatctggggtttggttgctcccgcgcgattctttgctgggaaatacactgtaactttcgctctgccgagatggtagaatacagctgacgtctacactacgatagtggctgtatctgggattccccatcggggccttgctgccctttgcgatgtactggctacacaagcgataccccgacaagattttcgatcgcattatatggcccatcgtgctggatggtggccagaccgtgcctcaagcgtgggtatagacgggtcttgtcaacccgagtaaacgctgacttccgcctggacagaccttccaatatcattttgacttccttttgcgtggcatggaccgccaacgtatgggttcgcaagcgatatccacgcttctttgcgaactttatttacgtcattaggtgggccgttcctcgacttgcaatcgtttccactatgttcggccggttgacgcttgatttttttgcttcagtgccgctcttgactcggcaacatcgcttcaagcgctggcagcttatgcctttttctcgatcgtcgcacccggctctggtccagcagagtggtggggcaattcggcaatcgataccgagcattgtagacctggatcgtaaagctgtccggcgaaacgggttctagcatcgaggagtttgtggcatcattaacatatagaatacatattacaggcatgaaagagacgtcgttatgtaatctaaaaggacaccattcgtgacgcagaaaaaaagcttggagatttgaaattggtgctcaagccatcaaggcgagctggttcgcttatataccgtcgtaagcatcgctgaagctagaggcgatgctgagtcgactggctccgattggaggagggggtgggagccccgacgagctctgaatcgtggaagcaggggacggtcccgcagacatggctaacggatgacgctgaggcgtcgaggggaaagcatcgaggctgacagccgaggcgccgggaggatggaccttgaacgagtattccggggtcgagttaacactgccgttggtgccgtcttcgtacacaatgcctccagcacgaggtgtcactggtccattggcggcgtaagaagcaggggactcaggcaatgagacgcccggtgacggaggagggaacttggccgaggggacaccattgctggctctcagttcagacgccggtcgagtatcgctcgactggcggacagcgatagcaggcctgagactgctcccactgatacgagcgctaccgctcccaaacgggttcctttcgtcgtgcaaagtggcggcgctgacttctggggtttccacctcgaacaagggcgagagcggtcgtccatgctggtaacgctcgggcatcattggcgggagcaagtcttcttccctcgtcgcggaaggtgcatcgatctcggcagctcgagcaagatcggcgtatcctcgtcgcaactcttcatccgtcttcttttgaccgtacatcaatgcggtcggctgggctgaggaagatttgcgatgcagattagcgccaccagtctcgacctcttgcgtggtctgaacgctagtgcgcttactggcgatgccggggtcggagaatccgctatagagaggcgagttgatgctgtccagcgagagaggcggcaactgaggcatcgagggagcagcctgagggtcttggagctgaacgcgaccggggtaattctgagcatagacgacgttttcgttccttccggacctctcgacaggactcaaggagcgggtgttggccaatccaagcccgttggtgaccatcaatccacccgtcgcgccggcccctgctaccccagccgaagcttgccatccgccttggatcggcgccttgcctgcagtggactgactagcctcttgcatatgagccgggaaatccgcgtactcttcagcgatggcgaccccggaaggtgacatggcctgcccgtagtagtcggtcggggtatgacgcccgtcctctgagtaacctccatgtccatgcgagctctgtccgtcctgataatacgcgtgctggatcgggtacgccgactcgctaccgaacatgggcgagtactggttgggtggtgtcgtatcggtgtaccgacggtaggcattggcaccggtcaaatcccgagtccctgcaccgccaatctccctcatctgcccctgggagacgtgctgggcatcgcgatcgtcgtaatcctctgcgatgacaaagttgctccttccgaccccagcgaaattgcccgtctggctgaacaccgtatcgggccgcctggaaccggccttttcgcctgaaccgggtgggtagccaaaattgtcatacgtgttgacattgccgaaatcgccttcgtcccgaccgcccgtaaacgatttgtcggtgatcagcacgctggaatcgcggtatctttgacgtttcttttcaccgccaaagggagccatggacgagtagggccgagcagcttggttacggtttttgcgtttctgcgaggtcgatgcgtgtagccggtcagtacaacgccatgttgtcgctgggttgtactttggcagactcacccagagggcaccggccagtaacaagatggcagcgattcccaacaagactccagcgacgaccccgacgattccgccggtcgacaatctgtatcgagcaccaggaggaacgccatcagcctctgttttctcatggcgctatatcgaatttgaagactcacccgcccgattcttcctccttggcgtcccccttgttccccccgactgcattgacgtccaccccggtcgaactggccgagctgctcgtcaccgaactcgaagtgataatggcaagactagtgcgagtgctggatgacggcgcgctgctgctgctcctcacgctcgagctgagacgggtagacccgattaagagggaaggcaaagatcgggtgtccgaggtgataacttgacgtgtcgagctcgtcgacggggtcgggctgggcgtaggcgtgggttccggggtagagaaagtaggaggagaagaagaactgggtggacgttgttcggatgtcgtcgtaggtgccgctgctcgggtagaactggacgctgcctactcgaccgggaaagacggaaaaaaaagaaagaagacagtcatcgtcagcagaattcaagccctgaggtcaattcttgcataatgcaactcacctgaacagagctagatgcccgcccgttccccttcgtgttcgcgcccgggggagttccggtgaccaccgtcgtcccgacgatccgggtgacgacgatcacacgctgtgattgcgtcccggtcggttctgtccgaagagccgagatacgggacacggagatcagtctcgaggtgttcggagtcgttgagggtgaggatatcgatggtcgaggatggtagacacggtacgggcgtctttaccggggaaagagcagagtgacgggtgatgaggtgggattcggaaggactcacgagcttgtcgtttctccataccagcattcttcttcaacctctttgcgagatcttgatgcgcattgtgctcgcgatgggagagcgtcattgtcgggaacttttatggtgattcggcgtattcgtgaaagtggtagtctatgttgagggtggtcggatttgacagaatgtcagggttcgacgtggaggaataggtcgtgatggttcaaaagagtgtaatttgatgagatgaacgtttgtgatcgagctggggtagtcgtcacgctgtgctcaagaagcaggtggagtgacgatcttcctcttcttggattgtctttgtcttgtctatctcaatgcgaagcggatttgtgtccagcctgttgttgtatgtcgtagtcgggaaaagagtgaaagcgaggaaggaaagaattgcggtcgggtcgaggatgatcgcgtcgtttgatgattgtcggttaagaagggtcgttccgttcgtgcgggatgggatgatcaaactcgagcgtggcctatcaaaggatcgagtctgtctaacgagtgtgttgtccggtcgtgactttctatggtcgagtaatatatgtcgccttctgttgacctcgacggacgagtatgtcaaactgtttggtgatgtcgttcgggactgagtctgagctgtctgatcatgtctgatgtcgcttttgtttgttttggtcgtcaagtgccgtgcaagtgagtaagctaaaagtaaagtgaagtgacggcatctaggcaggagagggagaggccacgggaaagagtagcgacgcgtattccgagacaacccctttgctagcgccctcacgagtttctagattaaggaagggccaggtggcaaggcgacgacggcgacgacgacgacgccggttcctccacgtttcaggtcgagaacaaaagaagtcgatgaatcgagcactaatagaattctagaaaagtgggacctcgtaatcgggatcacaagcgtacaaagcacagtctacatatcatctttgttcgtgacgacagttgccttcggtgcctttttgcctataaaggtcaaacggggcagttcattgccagtctcacgtgccggccgcgcccaagtgcagttcgcagcttctacgacgagcaaaaatgcagccttgacgtcttgtagagtagcgtcgtaattttcattgtcttgcttcttccttcgggccaccctcgtgaacttgccaatgtagctaatcaaactttgggacactccagagcccacaaaaccccgtctcaacttgtgcggctggtccggggctgacctgatcatgtccatcgcctcacgtacggctttgtcttcgtcgctcagctgatcattccctacccagccgagccatttttcgcagtacatgatgtcctcacaaagcgtttgataattcacatcgtcactcaaatcccggcgcttgtctaggctgctgatccggtagcctcatcttccatcgttggagagcttgttgggaagtgcgtatcgggattgcttgttttgctcattcatggtgacctccccgactgaagtccgcgaagcgacagtcatctcgctgcgcctggaggagaaggaaccaggtggaccactactgtatgcaatctgtacccacctgtgactgctcgttcgcccaataactcggagccactgatgctgctgccaggagcatgagtcaccgcagtgctagggtatgtaccgagaccgagtgactgcggaccgtgggcgtcatcgtggacctttcgttcgtcctcagatcctgtagaatctattgtcatcgtcgtcctgcccgatcctgcgaaggcttctggtctcagagaaccgccggggttggatagaccatactgcctcgatgagtaaaggtgctccaggggtgtttgtttcaaaagctctcccagttcacatacggattcgagcgaagataatgcaggtagcagtggaccggatcttcgagattcggaaacgttggcggaaagggcatcgggttgcaaccggttgtcggtatatctccctgctgagaccagacaccttgtgctgttagtcaggtagctgaagcttccttgagccgcatcttcatttcgcgaaccattcatgtctgtgtgccgctgataaggctaaacgcgtacctcgaactgtaacgataggatcctcggcattctcgtataagggtagcctcaaccggtagaatggtatgtggtggctggtatatattttcatacaaacatcggtgttccaggaagcatcagtatgctcctttgtctccggcgctgccggataagacgccatgcgagacacaaattgtgtgatccgggaaccgctcgttgctgtgccaaatacatctggaatgcgtagcggccaaggttcagcgatcaaatggtcacaaaatcgcagggagactctagttgtgccgcgattttgactagagacacacttatcagcacatagaatcggtcaaattacagctcagggcacttaggtgcgcaagagctatcgcatctccctacagctgaaacgttgagactatccaaatgctgaactacaagttcataccagtctcgatatatcagttccacaaatgcgtatccccaagtgaccatgccccagcaaatcaagaccctctgtgaggaagccaaacctatctcgatataacaacttgaatccggccgtcgttcgcacggttgatacctcttccgatgcaaagcaagctgaatactcagctaggggatatatagaactggcgattatactaccacttccacccccttccgggggcgctaagcttcgatcatgcaatgaaagatcgcgaaggaaggttactcgcgaacggagaagcctttcgcagcgtacgtggggtctcagcggcgagtaatcgaatatgttttgtctcttatggaaggggccaaggaatatcccgttaggatcgcagagaggagtgtcaacgcaaatgccagccgttctgagaaaatcgaccatgattgtctttgacattcgtgatggatttaggaacgacagtgatacaacagtatatatatgactgcaatgcgaatccatggtacagcggcatttattcgggcctaccactcgatgcctctgagacggagacgaaatcagagatcccgcacagcctgatctcttcagacccggggatcttaattcgatcattccacgcttccaagaatacaggcacgtaatcagtcatccaagacaattgatcctgcatctgagccttcagtagctctgcttgtccccctgaattagctcttgctagcaaaaccgctcggtagcgggtcagagctcctctccaagtattcaggtacattttcggaaggcactcgatcgccacgaagctcccataggcttccagagcgccttccatctcgatcttacgttcaaaatctccggatgaccaacgccagagttgtttgaccgagttgatcattgcgagaaagtcctctttatcacgtggtgggatggtcggtgaacgtcgagcgagagagtacttgaaacggacatcgcgcgtcgagaaccaatccgccttgcgtagcgcctcagtctggtctcgggctcgctgtttcgctagacgatctttctccgcctagtgccggacgctcgagactctgtgcgagggacgacgctgaagcagctgctcagtggtgtaggtgatgaagccctcgaatgtgacagcggcgatacgccgcttatacttatgtccggatgctccgttcgcattaaggattgacccacatgagtactcatgcgatactgttcgctggcggtgaactccctagtggtgggcaggaattcgccctcagtgtatttggtgatacagtacggaaaagcgcttcctcgatcgttcatctgggcagaagtctcactgttccgccaatctgcgtcatggagtctcaagtgcacaatcataactcaagctgggctgatgctgtcatcccacttgacctcaagtactgacgaaacggacggaagttctgggaagcgaaagcatatgtagccatattggggcgagtcaatacaaatggtatatctcctttgtactgcctctcatctatcacagctaagttaccctctttcacgacgatctggatccttcgcggagtatgatattttgagacacctcttgtacaatcagcgcgatttcgacattcatgcatttagattcgatccagcgatcttgaccggtctctctatttgttgaatttgttggtgtaatgattcgttagtcatccaccatgtcatccgttcttcgtcaaggggcgcctcgagaatccctcatcatgcggaacctgatgccgagacggctgatgcgagatccgatttgcccggctggatcaggcaaggtcagctgacgatgaaaggaataccttgtctcgctctgcacctcaggtgacctcaaattattcgccattgaccatcaaaactgggcacttaacgcggcggttcctcgggtcctgcggctaggaacccgaccgcatccagtcccctagggtctcgtaaaaagatctcttgcagcatcttcatcagctctaaggagttagctctccctgctcctgatacagtcactattctgcatggtagaaaaggaacttgcacacatagctataacattccggccaaaccgtttgatctagctataccgggatgagggacaactatcgttaatgtttatctatataacataatcagggcttggggaacgttcgatccagacggagggtggaacgagaagcaatttcacgccctacattacatgcccaatcccatggtattccgattagggtcggtatcaatcgagtagattcgtgttctgacacggtgggtttctggatacaatcgggaacgttcaaggcatcttccgtccccaggtagacgatgtcatccacttgcaatctgaatctcgtggtgtcgtcatgataactctgttgggtcctccgagctgggacgacgccgcaaagaatcccgaatgtcgcatatagattcggttctctgactttcctcctttctggatctgaaaatcctccggttcgatcagtcaagatctcgatataggtagtcaagtggttattgagggtttcccagagagacggtgaaacataatccacaaatgtcgtttgaatagcgtgagcttcgggttcagccacgattccaagtttatgaagtcatctgctgcatcctgaaacgatcgatcatcgtcctcaaggatccggctgtagacagctttgacggattccagtctcacgctcacattcagtctaaatcccgccgaacccttcaagaccggacctaccgcgtaatgccaccggccgcaaggagtctaatatgctgatcagccgtaacccctggggaacaccttcacagaccctcgatccttcgagagcgaactccccacaagaactcggcgatcccacgacacttccctgagcaataacgcgtcgattctatcgagaaccgtaattaggatactttcaaaaaggccggccgctgcggcgtctctgcgggattaccagtgggtggcttcctagacaacttcatcacaccactgaccgctggacagtcgatcctgtcgagactccgcggaccggtctgtctgaagggatcagagacagagtcgtcgtgcgacatgtgatttatcccatcggtcgaagaccgcccataacgcactgatgatcaacctcgctactaggcgcaacgggcgatatgccgaacgaatccttaccggagctcctggaagtcccgtcttctagtttatattccaaaaggatggaagcgtctacggacatccacgtcaaggctctgagcatttctctgttcgccctcgattcagtcatggttaaacctacacttttcatgtgtctgacctttttgagatgaatgaagatcaattctcggttgtgagtagtctggtgatgagcgtgcgaccgttcgctgatatatgcatatatacatatacatagacaagagtaagaacaccactagagtccaacctagaggcgacacaatgcaagtcgcaacacgcaaacgaggtttgcaccaaacgagaccaaggactcattgttgattcaggaccgggctgtaacctgccgcatctgtctagcctttagggctctccgcccctagctagctacctcagtataattttggtcgggtatgcttccaagattctcaagtctatattgttcaccctacccatatcacatggaaagatcacgacggacactgaaagcacctgcagatcatcccttgaggctagcccgactatcgaacttgattgaatggcagcatatggcctgcagcaaggtgcctctccaataccttttactgtgatcacgcggtacatgttcgacttatcggtacaaatgaaggaccgggctatagttgctatctacgatagtcgtctagcctcagtgcatgggcggcgactgagccgtgcctttcgaaaaactcgacatgcgccgcgattgaatctcgtatccaatccatatcgacttcggtgggcgcggatggcagggtgccagtccaggacttgaggcatctgtccaaaacaccctttgtgattgacatttcgttcgacgtaaaggaatcgaaaaagtgaccgttctgttcatgcgcgaaacagtttgttagctgccgtaagacttgtttgatatcccctggaacagctggtagcgcccccggctgctgttgatcgagcatagatacgaatgcagtaacacgagaaggtatgtgttcccaatgcaacttagtcagaacattgtccgcccgcctcttcttgtgccaattgaactgccatgcttcttctacagtcggtttgtaaagagcctcctcatacatgaggtagggccgcttggaagccttggaagccagaccgtcttgctgggtttccattccttcgagcgacaatatgagactggattgtgatgcgtcatggaggcctgaggctgggcgagctgagtggaatgtcccactctcatcgaattcgcttggttgatctaaagcgttacgttccgacgcaaacgagccatcgccagaagggatcggatcgacggacttgctgcccagaattgaatgtgcgggctcctcgccgcgaaccgccgtcgattctccgtgaacagcgccgattgaattgtgaagccaagtcggtatttctatcggggttttgccaacaaaggctattccgaccaactcagatccgtggatgtttacctcatcttctttcacatcgcgccaagccgcaaggaagccatgcagcaattcgaaggtctctcgaagagtcgtaattcgtaagggctcttcccggcgtgcatccggccattgatcacgcgctgcgaagtctcggtgatgcgcttgaacatgggtgtcgaggttctgccaaagatcaaagccaaaaatagggggcgatgttgacctgggttgtaggtggactaggaaatctctcagaacctcaacatccttggggagattttcacggcaacccactataaagcggtagccattcattagcgaatttaggttctcctttatcctgatcttcagatcattgacgcgaccaatcagaccagatcgattactaaatgagaattggaagcgtttgcaaatactctcctccgggaggggcaatttttgacggtctagcttcctttgctcggcttcccggttcgctaggcgcttaggtttggctctattcttcttgcctttagtttgtcgtacattggtgctcatggcgttgcttcgtgagggaatggaaaaatccagtcgagtatcgttgcgactctcggctgtgagtgggcccgagcctggaattgcataagcatatcaagccgtggggataagcatggggtcaaggtcgggtgactcatatcggactgactgttcacggtgaacgcatctgcttgggtagcggaagcctcggaatccacaggaaggtaggaacgccacaattcggttctcatggtgtaatcgatctcctccaaggcctccgacagacctggaccttccatcgggtaagggttgacggtcatgttcccgttctcatcggttgaaagattggtaaacatcctgcaaatcacgacctcgacgtcgtcaccgttttcggtggaaggtatcgtgcttggatccttttgctccatccttgtttgctttccggagaaccgatgagcaacaagtcgacgaccgcggggatgcttcatcaatctgatcagcgatggcctggccatctcgtatatatgtatttgcgcgcgtttcgggcaggacaaaggaagggctcgcgccattgaagttacagcgtgatccggatcgagaaccctgccccacgccgaccctgtccacttcaacttcctttctgatctctagcctgggtcctcagtctggatagaatccgcttggtggtctcgtataaggctgataatcgatcacgccatggatcacggaaggcccttagatcggccgcaaggcagcgtcgcaccctcttcagctgtctctatcatgttgatctccctgcgaggcttgtcttccccggcgtgatcgttgaccggaagcgcatcctcaggaccgcgaaaagcagggcatcatatcgttcttcaggatgtcgaatcagcgagccaagggattctacttggactagcaatggggtgctaggcgtttcgacgatttgaggtgggtgatcttggatgacatcgatgctttctcgtgacccaggcggacgatcggacgccacgatgaccgagggtgacatctcgggcttcgtgatcatttttctttcccttggactctcgaacggaaaacattccgcggtcaaatggagggagagtttgtattttccgcctccttctgcatgtctcacagctcaaagacgccccgccgacccgccaccttccctcgatctcgtaaaatttttccacctcgtctgtctccttgctgaaaacaaaaacaagaacaagattcatgtttcgatcgggatggcaagcgggatggcgagctgttgactctcgggcagtgtttccaaccggagcgccaccatcctcccatggtcgcgaagactgcgacacgcgacgagaggaagaaagcgagcagatccgacgatcgagacattgtattctcattttttctttcggcgcaagacgatcgtctccggacgtaggcaagtggcgagtggccaagtggaggcggaaggcgatgatcatcacgtgagtcgatgaacccgatcatctcgcaggcgcggcagccgtgcccgcgggtgagggcgagatgaaatcgacctacgtcatcctcttgtggcgttttgcgccctcagaaaaagctggaatcacatgctctccttacctcaccttgcactgttgccctgccctgccctcctggccccgaccctgttcctgaaccacctcggctgagaaaccaaaagtgtgttctgtgccaccgatctagtttccccgatcgagcgatctcgcgtacaatcggattcggattcaggcgcagactagttaattccagctcgggctacgcactgggacgatctagtttcgacgagaccgaggctgggcgtaatggcgcccaagccgcagcgtagacaggagaggaaaggggaatcaatggtgaccgggggcgcgaaaaacccacgggaaagaaagaagtcaactttcttactcctctctgttcctccacttcgtgaaccgtgtacgcggtatccttctgactcttggctcggtcgtcgatctgaaccgggtggatcgtcaggacagcatcgtccgatctcgagcatgtagactcgccgcgatacatataccacccgtgaccgcatcgtcatccttctctaggcttgttatcgcctcttgaaagcgttcacctcagccgcctttgataagagtttcatagactatacttgaacactctatcttcccgatcagcaagaccaggatcaggacgaccacttgccatttcgagctgacatatcaccatcttctcctcaaaaacacctcttacctagcctcccaccaccccccgtcacacgacctctgatgaagccttcaaccgcagcagagaagggcaacccttcggccctcctcgcctccaaccccggtgaaagggtcgagatggaccccgcaccggcttacgaagacgaaaagaccctccgagcgaggaactcggcagggttgtccgaggccggggggaaagcaggagagggtgtcgggcatggagacaagttgtcagcaggggccatcttgagaggagatgcgggtacgtacagagtttgggccgggtggagaaggtaccggggaggctgattgggagtacgttctggttcgtgctataggacacacgatgcccgcaacgccctttgagatgaaggccgccctggtcaaccggtgagtcttacacgatcgtcgttctcatacaagctcgagctgaggcgacttttcggtcaacctgcagcgaattggacaagatgggtatgggcaggtaccagaagagcatctggctcttgtgcggattcggatatttcgtggatctcatgtggtcccaggtgagtcccacacctcccgtggccgactctgcctgatcacgtaatgtaacgtactttactgacgacatccacgacaccccgcacaggggcttggtctgctagccacggcgctctatcaagaattcggtgttccagccgatagacaggggatcgtttttagcgccatgtctgcaggtttgaccgcaggagcgttcttctggggtctggccgtcgacgtcatcggaaggaaatgggcgttcaatatgacggtgttgatcacttgcgtctttgtgagtgttgaccgggccagggagctcccctcggttcaagaagcatgagcgcatgatagactgaacgacgagctgatccggaatgttggcgttcatcctacagggaaccttggtcgccgcttctcaaaactatgcgacggcttgtgccatgttcgccctctgtggattcggactcggtggacagattcctatcgacgcaaccatcagttagtacagcttcttgtgatgttcatcacgaaagagcgatcccgactgacattcctcgtcccaccttagcactcgagttcctgccccagaaccgtcgtttcctcctctctctcttgtcgatctggcaacccatcggtgtcgtcgtcgcctcggccatcacgttcggtaccgtccccaaatatcgatgcccgacgactaccccggccttgcccgcttgtttccaagtcgcagacggtgaaccttgttgttcccctagcagcaactatggatggcgagtctgctgcggcgtcctcggcgggatcaccctcctggtctttatcgtccggttcttcgtcttcaacttttacgaatcgccaaagtacctcatcggacgcggaaaggaggaagaggccatcgacgtcttgcacaagattgccaagttcaacaggatgcctcctcccgagttgaccatggagcatttcaacgatatcgataccaagatgagcgtcgtcaccgtggcctcggacgaggaactcttgggacgcaaattgaccgtctgggaaactgccaagagggtcgtcaaagagtcgatcaagagggcagctcatttgaagggattattcatgactcccgtgagtccggagacgggtgtcggtgatacgtctctctatcgactcgatgctgacgccgcttgtcctcgcagatcatggcctttaccacggtcgtcctctggatcgcttacattggagatttctggtcattcaacattgctggttccttcttgcccatcatccttcaacgacgaaacctcgagagggagatctcggtcaccgagacgtaccgtcaatacatttacatctacttgccaggcgtcatcggagcgatcatggccatgttcgccgtacagttgcccgtctttggaaggaaatggtcgttggtcgctggagccgcgttgcagggtgtcagtatggcttgttacacggccgtcaactcgcccgctgcgtgagtaacgaggcaatctcgcctttcgtccttcgagtccgagctgatcaggtcgtctttccgtctattcatcagtgctgtcggtttgaacgtgagtttctcgctcgcccgcatttcatccagcgcaggtagctgatccggtctcgtcaatcttaggcatttgagtacataatgcaaacctttttcaacgccattctttacgccaccacgcccgaattcgtaagtcgtctttcatctctacgtgaacgaggccagcggctgacaagaaattttcgcctgacagttcccggcttacgttcgtggatcggcatgtggtctcgcctcgacgctcggtcgattgtccggagtgagtcccccgcgcctgttcacgccaccctgcccgacagtcgctcattctcgctctcgttacgatcttagatcgtggcgcctttcgccgctcaggatcttttggccaagggcagtaacggtgtcttgtggctcgccgtcggtggtatctggctctcgatgctggtcttgatcttcctcccgatcgagaccaagtacaggcagtcgtattaggcacagagataggcacagagataacacacaggccggtttcgctccccttgtggaaaaggagctttctaagcgccctgtcggcgcgtgtttgctctttcggaatatataatgcataaaccctttatgtgacttttcccgtgtatgtatgatagatatggtgactcgatgtggaataataatcacacaaagcctgttggagagccgatggacctttgtttctgctgtcaactattcgttgccatttttaaccaagatgtcgttcctttgctgccaattttcgactttgggtagccctttccttcaagtaattgctggtcgtccttctctgcattcactcatactgctcttttcctccgtgataatgagattgaaagttagggttcttcaaacaaacgcaagtcgcgggtgcttccctgccacttttggccgtcatatctgtcatagcggagcatccctgaacgatacaggctaaactatcgcaaagtagtctgaggacaagtcatgggccatatccgacatgcaagggatcaccctgagtgtaactacctgacgagatttcagtcccgtatcaatcaacgataaaccggtaggagcctctgtaaatccatcagatacagtccgttaggagagtggccgtcatcatcaagctcagccttccaggcagcagtcactccaggcaatacccgcactagatgattgacgtcttcggaacagacgtctcgacaattcactagcgaatgccgaagtccgcagatgtgtatccacaagaagtccctcgtggttactggaatgaaactcagaaaagctgggatagccaagtaggcgcgataactttcaagactgttcatgtcgagtttttccaagccccctttgactctatctgttcgcttcagagcgttcagcaaatcttctgcgaattcttgttctttccgggacgtcttcgaggcaccctttcgtagagccgtcctgtaacaaaaattgcgcgagctgctacatgctatcttccattcagatagagtgctgtgatgctccggcccggattccatgaccaagcaacgaggatcagactcagtcaccttgacttgttcgccgagcggactggactcggccaatgtctgcgatttgttttctaaggataatgagtcgtctattctagaggagattggcgaggaggcgaaaccagtaacacctgacaccgctcccggattgtaaactatcaggcagggctggacctgatagctaattgcgcctccgcaggcagagtccgcacgaccaaaacccggctggaaggggctgcagtccgttttcgccactgtccagcctaccgtctcgggaccatcgaacgaagccatgtagctctgagcgtcgtactccattcttcaatcctgtagtaaaatattctatgaccttggcttcttttgtcgtgagaattttggccatggagtcttattcctcacatacggcacgtatatgcatgatgatcgaaaggaaatgattatataaacgtttttgaaaatacccatacgggtggctctgtctacatctcttacgcttacgctgaaaagacgacaaaggaggcaaccagcctagcaaatatctgatcgaatatggcgttgcgacatgatcgactaattggtcccgacaaaatccaggcagcctaccagccattccaattgcactctcgccaaagtccttgtaatcggccaagttatctccctcttgacaacacaacttttgaacatttctttcaggtaaacgttgaaagaggggaggggaactgtggtttacctgaccaatcagggcgacatccggtggttcgatgtatccactcctacgtaatgggcgtacctttcatcttgcgtagtctagtcaggcttacgccgcacaagggtgccagttgggaacctttccggtaattactgtgtgatcttgctgtatgcgtcagtgttttcccagcggattccattagtctgcaaagtatacgagtgtataaagctctttcgagtcttgcgagttgtacacctagcgatcttcatgcctagtcctacagccgcgaccatgccatgagtccgttttgtgaattgtaaggacgaaggagcgcacgtacaattgcgtatcagtctgtcatcacgatcgaaatatagctcgcgttaatccctacggtatgcaaagatcgtaacagtagtacaatatgacagtcgatccagagtatgataaatgcatcgttggcacgcatgaaaatttctactcgataagagacatctcgctcccattagctgaacgtatgccaacgaggatagtatcttttgcgcccttttccacctcagattcccacgccagtgtgatatttggtatgacctcattcagccaccgttcagtgagatggtcgatatcttccgggccgtccttggagagcatcctgtccaacaaattatgcgtgcgcgcttctaattccatacgagtgtggtctggtaggaatccagggagatcgatcttttgcatatatccggacaatttctttagactgggatagtagaggtggaattcgggccgcacaaaaggctgtgactctgcccgatccatcaaaacatatgttcgcatttgtctcctccgctcgtccggcggtatcgtcgatggcttttcgttctcgccacgaatctgggttgtataataaccgcacgcaaggttcgagaaggggtctctgagctcttgccacgagttatcaatctgagctaccggctcacttctgagctttgatcgaccagtttcaactaagggatcgcaacagggagcactgcatgtgacgctttcgccgttagatcccggcccggttcctgcttgccattgggttgtctgggacatcggaagcaatggcgattcaccaacaatggtaaacatatcttatgcggcacgtaaactatgaagcacctctccttccgtcgggggcgagtagcatcaggtattgtaaagaaagtgacgctaggcggagatcgccacgacctgtctgcagagaagtggaaataatcggccatgtaggtgagacctgccgcgtattatcatgcgtcaacttggtacagtaacaactaccttcttctcggccccagacaaacaggtgcgtctctataccatcgaaataataattcggtaacatcacgatcgctcagtcacactgataacagtccgcaaatgtcgtcattatctgtggaaggggcgcgcagagtgactgctgcatccgcatgcaatcaaaggaacagcgaaatggcagcgatggcaggaagatagcgccggtcacggtgtttcgtagcgaaaaaggtagagccaaacagcctctccgtcttgccggctgactcgcggacagggatgtgcatatcacgctgaagtttccgtcaagcctgctgttctacgagacgtcaatcaccgacgacctattgtcatctgagccagaacctgctattgcataatggttgctatccagctggccaaacaggcagtcatgagcgagtctggataggattctcaaaagacgactaacaaaagcgccctgttcacgttacagacacaggtggcaatgatgcccctctggtttgccctgtctgcaaccacaagaagtgaggaaagggtgaggtaatcgggagcccatcagcttttcgcttgtctgcttagttttcaggttgctcctttttgttgaccagccagtcgattggagtgtgcaggttgttcttttcgtcaacaagctcggcgcatcgagtctgctgatcggtgtcgattggagtgtgcaggttgttcttttcgtcaacaagctcggcgcatcgagtttgctgatcggtgttttcctttacgagccatttgtcttcctgagagattcatttgttggtctgaagcgcatcctggaagagcgtcttttcctgggcggtcttgacagctttggccaacagcatcttctttcctttgccaagttcaaagacacgcccctcaagcatcgtctgctcatcctggatcgatctgatctcctcgagcttgctgcgaatcgtcttgtcttgagtggtgatggtgtcgtccttggatttcagctcctcggcctgagtggcaatcgtctttttgccaagctcaattgtaacaacatgtttgccaatcctagcaacatgtttacgaaccgtagtctcgtcagccgagtcggggccgaactcccatgggaccggctccagccgcctggtgcggggggctttgatggccgtcttgtagcggaaaagtctgccgtccttgggtacggcttttttctttctttcttacctcgacgcggtcatcacggtatgagtagacgtggggtgaagggaatccaaagaaccgttgctgctcgagcgtctaagcgaacatccatgataatgtcatttattgtgttgtcatcattatatcatattcatgtaagagttcatcccacatgctcgcatggcatggtgtcatcatgtgattcaccagatgtgcggggtcagttgcgatattctgcagcagaatttccaaggcattctagaaaaggattccgattcgtaaccttgtgatttgacgcgaattgacgagaaaacgaccgcataggtggttttggtttgcgcgttgagatcaccttgacacgctgatctttaagcagctcgatacgaaacttgccactgtacccgcggtcgagcgttcgacgatggctctgtacgagagtagcgatgacacatgaaacgtgtatctccatcgatgagacgcctgaccctgacgtctctcttcctctcttatttttaattacgcgtcgccccttccctcgaggtcggtcaagctcatagttgaccggtcttctactacttgggatcatgcatatctcgtcgacatcagatcctcctcttcctaccgacccaagctcgtcctccctatcacctaaggttatcaaactccggcgatcatggatccagcgaatcccgataccccggtcgtcaacgagccggaccctgagcacgaacacgacctcttgtccaacatcgacctctccactttacacgggttcgggcttgaccggttcttacccgctcgggatgatacgtcgggtaggaacaccggggaggatgaatacgacaaggaagacgggacgatcagagtcgggtctacgaagaggagctcggaagatgatcaaagagaaccgggagggtctggcaagaggagaaaggtcgatgagggtgtcgaagggcgcggaagggaaggaggtccggatctcgatgatcgagccgtcgaggataccttgcgggatgaattggacgacgatgaagaaggggaatatcgaccggagactccagagactgatcgggaatcccacgatcacgatagccatcatcgcgtcgacgacaacgaggagggggacgacgacaataacagcaacctcgacgggtccgatcaaggaaacgccgaggacgactctcctgccgatacccagcaagatcaagttctcacaccgagcggaaacaaccccgatcccgactctatccctctgactcgagcttcatctcagatcgtgtcaagaaccggtaccccgaacccgaaccccgagtcggcgacagggcccgtcgatcccgcagcccgaaacaagaacaacaagcaagtcgataatcccgataaagacggcgagaaccaggaagagatcctgactcccgaacagaggagagataggcagaaagaagcgaataggctggcagccctgcgtagtcgggggaagaagaggggggagctgtgagtaccgctagggaatcgactgggtttgatacatggaaagctgatcatggacggtcccgtcatacctctacctgcatatccttcccgactcctattccccaacgcaacggggggggggggggggggggaaagggggaagatgtcgatgacgtgaatcgggagaacaataacgggaaacagcggataacacagaccgaccacctggacgacctgcacttacaccttcattctttccctctcctctcccaccttgaacttctttgtcctcgccttcggttcgaaacaacaacgaaaacaaccacagatccctcgtcatgcatgtaggcacggtaaatcatagagcacaagctgcttgggagaggagaaggggcagggtcggacgagctggatcacagtcgccaccgctcagtgaatatagatcgaccgctctctttcacaggtatgcattcatgacggtttttccccgtctagaagacaaattcactcatttgctcctcgaaatcgcatccagaaatccatatgagcggaccaacctcttcgcaacatacacaggcctcggagcctttataccatctcggttctgtcctcgactcgaccaacgcgtcgggccaagctctcaatctcaccggtttactaggccgggtcgagatgccatcgggcgaggaaggagaagaagccttgcttcaacctagtgtctcccgaacgatcagtcgccacactcgatatgcaccctcgccgaccctttcatattacgccaacttcattcctgcaacgccagcgccaatgccagtgccacccatgccgaccgaccagaccgcgacagcgaccacctcttttgcggtccatcgaagcgattctccggggttccggcccggagatcgcaaagtcaagcgaaaggagcctcccgcaccgatcgatgtcgaccgtgcttgcgggacgggcaggaaagcgcaagccatgaatcgacaattaccgctcgtcatcacgcttgaaagcccggtacaggacgaacattcggaccacagagccgcgatatccgttcaagaggatcagtctctcgctactcggcaggggcccgaagtttcagaagaacgccaacgtgggttgaagagcatttggcgatcacgatcacgaagcgggaagcctgtcaatcccgcctctgaaccgagtccggaatgggtcgaggtagagcaagggtatcgtcatccttcttggatgggaggtcttgacgttcgggggatcgagctgctcaaacccacccgcagtgaacccgtggtatcgcatagcccacctgtagctctcacgccatctcccgggactggagggatactgcacaacatcctcctcactccaacctacggcggctccaccagtcgacatcgaaccccaagtccaggtcgaagctcgaccaacctgatcccaactgaatgtgacaagactttcgcggacgactgtagcaagaagcagaaacgtcggacgcttatggatcgagcaggccgattgctgaacgagcagagactgaaactcgtttatgaagacaacaaacgcgccggtggtgaacaacacaacagcgtcaaagtcggaggattcgtaccgcattcgttctctggctacaaaggtcgcatcgtcgacgaagtcagtcccggccatcttcccttgcatcgcatgcactcgtataacacatccgactctgctcgacagagcggatacgaggtcaaaggtcgacatgcgatggactccgagaggggggggtcgttccgtactgcgactcctggtgccagagaaggtgtcgaatcaggccgcgagaagtcgtcaaggggcatgtataagagttccgcctcggacaaagatgcgcttttgcgcaagaggcgccggaagaaattgatcgtgagagcctctttgaagtctaccgccgagtcctacgtgccgctgactgatgcgttcatcgtagtttctcggagcaatcatcctgctcatcattgcgagtgcagtgatcggactctgtgccgggctcctgacccatcggaacgatgcggccgacacgcgcgaagcctctgacatccagcaaatcgcgaccgggacttcgacctctcccggtcccgctccgacggccacgtcggctacgtttactctcgcgacatgtctgtcgctctttgccctctcggcgccttcggcgcctcgaacatatccttgcgatcaatgccttcccttccttcgtacggctaagaacgactttgtcgctgagaacagcgctgttccgagcggcaactcgaccggcgtgggggccgccgttcaattctgcggcttgcaatcgatattcgcgaacaccgatggtgtcgatctttcaggaaagcgcggtggagtactagaaggctggatgcagaacgcaaatccatgtagtggctggagcgggatcacttgcgacgagaaatcgcgcgtcaattctctgtgagcgatttcgcaagggcaaatccgatgacgcatctttgcttatcatcgattatgtgacggatagttctctggtatatccgggagtacctcgggtgctggacgcttccattgctggtcttgtagctctggaacgagtaaagattgtcggcgattctcaaattcctagtcagtatcgttggcgaatcggctgtcgcgcaacctagcttactgtgcggtcattcgacaggcggtcctgttcctgcagcctttttcagctcatctttgaccgctgtagatattcaatcgaccggattgacgtccttgagtaacggtgcctttgcaggcctggcatcgttgaccaatctcgtattggtgtcgaacaagcagcttggttcctccctgcctcctttgccgcaaaccctgaaattggcaactatgtgagcttgattctgtgcctcaacatggaagcacagcttacttactaatcgaacgagccattcagctctgtgacgggacaatctctcaccgcggaccccttccctggactccccggatcgctaacctacatgtgaggggtttgcaggtttcgatagggtcgcacgcctttcgctgacctgagcacttcttcaattgcatagagacctttcatacaacgctttgaccggtcctgttcctgacctgggaaagttcatagctttggaatctctgtgagtgattcaaacggtttgtatgcataaccccgaagcgaagattgactgtacgagtactatgtgacagtttccttgattcgaacgctttcacgatcatcccggaaactttcccctctaatcttcgtgacctttcactccaaggcaacccgtcccttgccggtgtcttgccaccacagttgtgttcttcttcaacgctgaagacctgtgaacttcaaggcactgtgcttggaccagcaaacgctcaaaatactaccacaacccagatcgccgctatcgccacccgattgatcaacgcaacagctacaacgacactttttgctacagccactgccatcgctacgagcactgctagatgtggtgtttgccgattctagtcaataatgtagataggtccggccatatacccatgcaatgaacgaattcgtgtctcggataaccgatgaccatgatatgcttcgctcaaatggaatactcaaggtctttttgaacatgggatgtggatggggcgtacagactggtatagagaaaaaatcggaatgttgctatctactcgtatgtcattactgctagtcgccagatacgaggacgtcagaccgccgacttggtctggtttgtcgtggcgacgtgttcattctcatcgacatccgatgtagagttcttactgactgcaagatccgctctcggatttcgccagaagacggcgaagacgagcatagtgaagacgacccaggcgatatcgaagtacatatagtactgcgatcccttccagaccgagaaatcgttgccgactttggagaacagtccagcgctgaccgaaagtccgataacggagccgatttgaaggaagatctgaagtaaacccccagctactccggaagcagatggtggcagtgcttggatgatgctgacttgaagtgccaagaaggcaaagaacattccgactgacccaacgaatggtcagctcgatctggtctctgagctgagtatgaggaccgggtacttacgagatccgataaggaacgctggaaagtcgtatttccagtaatcatttcctcgccctccgtcggagaatatcaacaagacaattgctggcacaacggaagctattgaaatgcgtaagcagatcgaaaaggttgttcgtgtacacgatcgacttacccccgtagccgatcaaaatcgtgtacctcggctttgaaagtatggtcgggaacgcgttcacgagaacgccggctagcaagcccaccagacccatcggcaagaggcgggccgcgactagaatcggcgaatatccgtactctggtgtttgccagacattggcatgctcgaactctgttctgccagtattcagcggcattctatttaaacgggaccagctctttgacttacggagagtaccccaccacaggaatggagtgaggctacagcgagattgcaatcacatcagcttatggcggtcttttcacgccggatttcgaggcttacgcggtgaaacacaagaggaccaagttgggagaccgcatcaaggcgatagggagcaacgccttttcatcgtgctggaagctttcccagacccagaaacccgcaaataggaacacagcgataaggaatggggcaaggaacttggcgctggtccacccatcggtcgtgccacctaaatcggcatgatggaaggatagttggtcgcagcaggtgataggtggtagagacgggaagcttactagtcagacccaagatgaataggcataggctgctagtcagaatgacggcgcctcctatgtccatgcgttgcatctttgagaactggctggagtgcctgaccgtgcttcctagaggcaacaggatcactccaataccaaaggcgctgagagcaataatcgcgaggaaccgcagtagccacctccaggaagcttcacctagatcgaataggccgccactgcggacgacacggatgcacagtatcgtgtgggatgagcgattcgatcgtgttctatcggctcagttcggtcaccgatgcttacaagacgataccaagcgagttactgatcccggcgacgagaccgatcatagcgatggcaccctgttgcttggtcttgtccgtgtaaagatgtacgatcaaatggctgacgagtcgcaagtcgagacgcaagtgtcagatacgtgcgatagtcagaggattgagtcaagtcgacctactaggcggagggaatcgtcatcgacccgaccagaccctggagcgctcgaaggactaagaatccatacttgttattgactgcttgaccggtcgtctgcacatcagtaactaggcgttcaaccacgatccacaaggtactgacggaagcttgacaccaaaagaagtattccaagggctccaaatcctcccagaaagacgaattgggcgggaaagatatccgcaagtctaccgctgaagaggaggaagccggcgaaagtgagagtgtaggcgacgatactggcggcattcaagttgtttatcagtttatgaaaatggcaacaaatgagcaataaacgtgtttcaaactcacatccaggtcacgttacccgcatgcaagtcgagatcttccgcaatctccggtgtcaggatgagtaaggcgctgatattcaagacatcgatggccgtggccaaagcgaatacagcgagaaggacggccttcctggctgaaccgaggtttgcaaagggaccttgatgagcaacttcggttgcggccatgtcttcgtcgtcatcctgaggcgaggaggacattgagggagttttggccgccgggggcagcttggaatcgacgtgagttgtcatcaggtctgcgatactaagggattgccgccggaatgcgtcctataccgattgtttctctatcttcgaagtggtcggtgtgatgacaaagtgaaaacgaaatcaggacgagaagagacaaaggaggctcatcggtactgactctgatatattagcagtctataacccgggcaaagatcgactcgctccgtgatcggtgaacgatgtctgtttgctctgagaacggacagatcccgtatgcttgtgaggtacgtgaggtctgtggacgctatacttgtagatttgtttactactatgattcgacaaaaatatacgtttgatccgactgagatgatggaactgctgcttatcaatcgacaatgcccgttgctgatcctccgaggcgggcataaggggaaaaggcgatttgtcacgatgtgcgagacggaaccgcatcgtacaacaagggggttttggtttcacttgttcgatcatgtacgttacggacgcggcaagagcgcgcgcgcgtcgtctagggagatcggcatatccttcggcgatgaatcaaaggaagatccaccaagattcctgattactcaagcccgttctgaccaatacacgatcctctcgcttggtcagcctcaaggatgcaaatccaggtcttgtccattgcatcagctggtgaccacgttcatggagagacacctccccaaacgctggatacttctcatcatccgagggagtcgggcagaacatattgcatcttgacgccaaccttctgcttccgtcttgttccggtctgtctcatcgggtttccttagggttgaaacgtacatcgtctaacgcacgtgttgcgcatcggatttacttcggtctcatacagaactgtgttattgcggctttactgcatatgcataaaaggattttgatcttgacggaagacggagatgcagaaatgcgtcaatctttggtcttctgatcgttgtagatcgatggcaaatgttcgcgggtcatgtcgtgaaataccgggctcaatctcggtcgcagccagcggacgttgacgagtattcgggcagcaaactatatcatacctacccttccatcatgcgaaacgcctttgtcgcttcttggcatcgtcgtaagatcgccgaaggctagcccgatggcgaggccgaaattacggtatagtaatgtgtttcgcttggaagcggctgcttgcacgagagtcgctgtggagtcgagcagaccagagaatcacagagacccaagctgctgtcattagagtcatccttaacaaagtctggaaggaacacatgccaatatatgtcgcatagctaatctaggtatagttgcatatgcgaatcccttgcaaacatcgtaattggcgtcctcaagcggaagccaggagtcgttgtcacgtttgagagaatatgagatttcagcggtaaagatgaccgaaacatcgatcgcgctacatgccatcctcctagaatgcaaaagcgacgagtcctgcaaccatcccgacaacacccatgccagcgacctgaacccgtccagcggcgttcgcaggtgcactggcagaaggagtgcccgaagcgttctgagcagtgttggtagaggcccgagctgaagtgctcgaaacccttgtgctggttgccatcatcgaagtctgagcagactcgacggcctcgctagcggaagagctgccggagctggcagcagaggcggccggagcggtagccatcgaagcggcggactcggtggcagacatcatgttggagaccgagtcgctagcagatccaccaacagcaccgacaggtcctccagccaattcaccgacaccccaggggatggattggccatcgggctgagtctgctgggcaggagcagtggtcgaaccgtcggcacccgcaatctaaagcagcgttcaataaacacgatcgcctgatcagtccagagttccgttctaaccgagtgtggtcgcatgtctggaacttacggtgaatcgggtggtccaagtaacttgagtggcgttacccgtgttaggggtgaattgcaagaagtagatcttggaggtgggcgagacgtcggggacggtaaaggtgtactcgtcgagggtcgtagcatcaacgccagtctccagagctgtagcagacagataccgatgatcaaaacacgtacacggtgtgatttcatcgatttttactgactggtaacggggatcatctggaagttgtctccgctcatcaattggatagtgactgtgggaaagcataccgagatcagtgatcatgatctgatatctccaaggttcctagattaagatattggactcaccgttgttccactccccactgttatccttggtccacaaggtagtcaactgatcgccgatcttcgcgacggtagcaccatcgggcgaggttgggatcatctcggcagaggcgaccgcagcggcggctacaaagagagcgataatgcggcagaacatcgtggattgctgaaatatgtggtatgcggtagtagtgttgcagttgtagctggtgatctttcgtaataggatgaatgtaggagtctgtttgttcgatttccaaagcggttgatcggtctttctggtgggaagtcgttcgtggtaaagagcgtgaaagtggttgttgaggccagtgatgaaagacgtgccggatagaaggagcagagatataacaattgcaagtcaggcgattgaagtgtgaacgagagtctggcgaaggtattagcgagagctgtgcaaggttgaaaaagaggtatcattttgatggggcggcaaggttgctacgagctacgaggcaggccaaggggtgttcccccgggtcggtcgactgcgttgcacgagtcggcgacgcagcttccagctgccagcttcctttgtaattgaattgcgaaactgcttcacccttggcagccctccttcccatgcctcgaagcccacgtggagactcggggtaaatggaaatgccgtaaaggtagaacgcgaacccaggccgaggtaaatgccgggcaacaacaacaactatggatggatgtgtccgaggagggataaccggggtaatggccgtgatgattaaaatactgatcgtcatgggtggtcgttaaacaggtcgttacacggcgtggacgtgacgcattaaaggtgatcgagcgtggcaggtagggtagacatggcaacttgagaaccgacgtatggcgacgttgaaagacgctccgttcgagggaaaagcgacagagcgagggaaatcgaagggacaggttgaggggcagaagagggtgttcggatgtgagtcgggtcccaccttacttagggcatccagatctatagcatagccgtcagatagtcagcgggtgcctttcggcgcaatccgggttggcggtggctcactctgatggtttgatcaaccgaacccgtcgccatgacattcactctgcgtggagtcgtgcccgccttttctttgccattcactaccgcgtcccctgcagcgcctccgaccgtcgtcctaccccagaccattgtcgacacaaagtgatcgtgcgcatcgatcgtcttgctcattcgacccgtctccagatcccatatccgtattgtcttgtcatcagaggcagaaagcagaaacttgccgctggggtggaacgtcattgctcgaatccaattatcgtggccactctaagcaatagcaaggtccagacctgacgtcaatccaaatcccgtgttggtggtagcgttcacaaggtccactcacgaacaccttcaagcactggcctgtcaaagcatcccacagccggatcatcttgtcccttgatcccgtcactacgaaacaacctggatttttcgcccgctcatctcctgcagcggcctgggcaaccaaagttatgatcagcacgtcatggtctgcgtagcgtcgtttattgactgcacccacagtgaggccggctagttttcggatggaagcgtatgcagcgacaggggcaaattcggcacattctacgacatgttcatgacctcgcaatactgtcttggtttcgcccgtatttcgatcccagaccctggcggtctaagaagccagtcacagaatatgagctcgcagctccgggctgattatgtgaacgcctcaacttgcctggtcgctggatgctgatacgagccatcgcccatcatctgaaggcacgacgcttcgcacccactcgtcgtggccccataacgtcctgacgcagtagctgtatgagacatcgaatccgcatgagcctcgtttgatacacgggacgtcgatgatggccagccgggagactcaccccgtagagacttcccatattcgaatcgtcttgtcgcggctaccagtgattatgaaatccccactcggcaggaatttgacggcagagactgaatgatcgtgtccgtgtagcgtctttgtgttcttgtattcgttgttcgtgtcccatattttgagggaaaagtcgtttgagcaggagactggaagtcaaccggtctccgagtcagtcatatgaacggatcgtattgcacctcatcgcgactaacctaacagaccgcccttggtgtcaaaatccaagtccatgaccgcctttgtgtgacccttcagtgttcgttcacattcgccgctctcccaatcccaaatcttgatagtagaatcctcgcttgcactcgccagaacgttccaaatcgggtggaagacgaccttggagaccggcgaacggtgaccgaggagggtatgtcgttgtggtaccctcggcaaccaaagagcgttggcactcgatctcgacgctgctgatcgaggaagcgtcaactcctgctctagtgctgcgttcctctgctctaaatccccgatctgaatgagagaattggatcagctcgagaagatacattgtccagcgagggttgcttgcctttttctgaagcctgatcaagctggtccatttcttctcgagcaggccttgaaaccgcttgttttgaggatcgtctaattgtagctcctcattactagactcgaatttaagagcttcgaatgcggagtcgtttccagaagcatgtaggtagaagaggatggccttgttgctttgggatggtgaatgtggttcaagaagggaagacattatcagtttattagctctcgatacgtctctccgaggtttgtgctcacagctcgtcccgctgacgatcagtgagatatccggccatgattcgagcaatagattatttaccgtgatcaacttctgaccttgtgggcttgtaagttgtcaacctgatgaccgaggccgtttgatgaagctgtgaagttgcggtctagctgctttgcggttatccctgcgaaggacccgcagaatcgtaacgactgtgatatagcgaaaatactatggcgaaccgatgccgatgaagtctgcgatatgcaagtgagaaagcagattattgcgccccagagcaagagggcccgttcgtatatgggtaacgagatacttgcccatcattccctgcatgcatgtgcttcttgcgtctcgatcacccatacccgacgcgtatgtcacctcagcgcggctcgacctccagatacgtgggggggactcggacgtctcttgcctcaggtcagctagaatgggtccactccttggtcatttccatttccatttccatgactgcgagctctgatcgatatgctacatggtacatattaacgataaaccacccggttcagatacacccgaagcgttccccatattcgtcactacaacggttcatcggccgaatctgccacgaccaggtataaggaatgcggtaggtatcatcaatacggcctaccaccttcgggaccaaaggtcaatagtccgtcgccgatgttggtcatgcccatcccgtcgttcccggcgccagaagcgatgttgacgctgttggcaccgcttcgatctggcaacccgctccctgggcggccgatatctgggccagcataccgtactcggctttgtgcagatgcgaaaccgtagagaaaattcttgtagtaatcatcgtcgaggtgattgtcgaagaagttgaccttcatcttgaaaaaggccgccgaagtaagaagggagtcggatccggcttgatgttgaggtccgattcgttgcacctagaacagcagacgttcttgtcaggaatcgaaaccggcaaatctcgcgttgagaggccgctcacattcatcatgtctgcaatttcctgtaatccacctttcagacttcttacgctccgcatgatatgtttgatgtcgtatacgtgagggaaccagatgtgtagagcgtcgaagaattccgattcgatgggtggcaggggcgacgctgtgagtagcttgaggaggtacccaaaatcgtatccgctgcatcccacgaccagaaggaacgacgcggttattggcatatggacggcagaagatctagattcaatggtactcacgagtgaaagctgacccatttcacgttggagaacagcaccagtcccgatgtgatgagatgttccgcaaagacatcattatctataccctcattctctaaccgcttgaagtcgatcccggacttttgcagcagttcaatagagtcctgtgcgtacatgtcatcgctgagattggccgatgaagcagcaagggaaaggtacacgaaaaggtaaacgcaagcaagatcagagggtgtcaccctcatgatgaaagggcgtattttactcacttgagactgaatctaaagttaaattgccagcagcatacttctggcatattgccctcttcatcggccaaagtcaaacccagttgaatgatcttgagtagatctacgttgcaacgcatcgtttgaaagtggtaatccgatcctgttcgaaatgttccgattggtcgcgcgacgattccgggaaattcggtgtcctgtcgggccaaacggaacactcgaaattagctgatgaccttcgatgaatgtgacagtacaggtcgcataccatagagactactgggtacttttctatcgttgcacgcaatgcatccagctcttcatcgaggttgtccgcccatacctgttatgacgtggtcaacgtcctgtcccagacatatgaaaaatgactatcttctagatgctgacttacctctcgtatccgatgtgccattgtagacacagcacgacctgctttctgtctatgttcgaggagacagggtttggaatcgttggtagatcgcgtctagattgacccgagaggtcttcggctgtcgatatcgtgccgcggtgtagtctcaagttgatcgttatggctgacaagctatggtcttttaggcttatttgttcctgcataaggccatagagtattgaccctagcttaatctacatctcgtgcatcatggtgatatcgggtacgcatctggcattcctggtcggcctagctaggtcggtgggttcagcctgacatttgcttcgtatcgcgcgacaacatgatgccgtaaagccgcggacactttggtgaccacgatatctgtaggtatgtcgctgtcgatcgactcgagcgctcagctcattcgaccggatatgctaccgccacagggtctagaaagttttcaactgcacgagtgcggttggagcaatcaaatggttgtcgtggtataaccagcgacatccatcgctgagcagcacttgaacccgcgatttcgggatctcctgaggctctgtacgagattgcccaggaagatggccttcgcatgcatgcgtcgagttcgcgatcatttcactgccctcctacatcctgaatgtcgaagatctagatgattgagcgggtttcttgagccaggcagaggaccaaccacctcgcatgccgccaagcggactcggagaaaaagaggaaaaataaccggtacagtaagtaccacttacctcgcagggtcaagatgaactcagacacaggctgatcaaaacccagagacaatctcgattttaacctataggaaagagaaagcagtgtgtggggagttatagggttcagccgagcccgggtcgcgcttcgtaagtgtcaacttgcttgccttgtgtggttgcagcatgcgggaatgatatcaaaacgaagttggagtgaggacatctcgagtcgcttcaggattgggaatatccttcatgtgcattgattactatacgactccagcttttccaactcacctcgctggattatcttaacctttgttctggccgttagaagctggagctgaccaatctctttgttgcctaattgcagcacgataatgattttcctccagtcgttgagttggtctaaattacttcttcatataatagatgatgttacatctttaaatacctgtctcgttcagaatcatggagcgatgggcttcatattaagaggctgtccgcctctcccgtagagattggctttttaaacgctagttgatgatggccaagctttaacaagtctacgcaagagaaattgtaccgcttatgtcagtcacgagcgtctcggcttttctttcaccaagcaattggacaagctttggaaacgaaggggcccattcggaagatgggataactgtgaatgccatagcatcctgggatagcagtcaccgcttctctccatccgattccggcataccaccgctaagccataacatcgtcttaggacgcaccgagacgtggcaatgtatttgcaggacgaatagctcgttcaacggtactttcggtgtggagagatcatgcttatgctgacccaaatgtcttgcagatccggcgtattccacggccgaaactgactggtctttggctcttaagggtagtcagcaggttggtagatgctacccccaatatggctaaagagcgtagcttgggaaacaagtagctgtcatgcgattggtccggagaaaacgcttgtaattccgacataaagggacgttaagagaggcgggccgaaaattgacaccccttaggataatgttgactggtttctccactctgagcatgcatcaagcaagcgttttctccatatccatgtggtagtactcgcacgtattctgaaagtgaacagggtcggttcaattgtctacccttctcattagtagacgctccaagaccacttacacaaggaggttgatggcaaacattttgccaaagcttctttgcggtcaattgagtgtcagccatggcggatggtctcgtcctatccaatgtacagagtcatggagaccgactttctgctacggcgagataacctgaaaccccgtgaccgggctttatcgggattggccgaaacgaatttgatcccgaaatcacgccgaccctcgccgccctcagtcttacctatttaagatgatagtgatcccgatcctacaactacaaggtctcgattgctcatcgagtggcaagacgactgacgggaaccagacgtcttgaacgacagcatcggctcaagcgatccggacgcgctcttgatagcgatcggtatcccttcgcaacctcacccctttgatcatcagaatcctgtcaccctcgccctcgcccgcggcggacattacgaaacgcccttcaatcgatcgtaagtgccgataccctgacccatatctcacctatttgtgtggagagatgtatcgagagatcatctgtgccagctgtctcgcagaggattcatcttctggagcggagacgacgtccggcttgcctagattcaaggctcaaaggacgctgcctgtcgccttagcctgtcaggtcacgctgccttgattattataagctgaactatcccgtccaagtgagcatggtcgtgagcggattaaatgacgtcctcatccgtcattacactgagctcaccgagctcattattgccttgcctgctccagctgctcctcactatcacacacgatgagcgtccaggccgagaacgctatagagcgctcctctcgcgaagattgccccaacactagaccaatcaatcgagctacatcacctcagttcggaccggacgattccgatgtcgaggctcttgacgaagactttttcgcaaataaccagcgctatcctgcgcgaatgacctcgccccacccagcacaagacgctcagaccgatctcagcagcagttggctcagtcttagcgatcctggaacttccacgtcggggttcccttcgagcgatgaccgcgacgctagaccagctgtacccgaacctgagagccctgagggtttaagtctaaggctaagctccagttggatcgacgccgaagcccggactacttcggaacagctgtcccctagcgaggcgaacggtccgggaggcgataatcgagaagacgttaatagtaccgaccaagaagaagttggcgggaggcaatacgatgcctctggctctgctgttatcgacatgggaatgtcgtctatcgagaaggtcaaggcttggagcaacctccggtctccggatcaacacaacgtggaccttgtctttcctaccttagacaccctggacgaatccatgcaagggactaactcgtgcgatactatcaagaacaagacccgattcaatcggtctgcatccgaatcaaccgtcaaactgatgaacaacagcaccgaccggtccgtggacgtccaccagtcctttctttccgactttgccgaccctgaaggaagctccaagcacagcctcggcctcgacctcgacctcgatctcgagagagtctcggaccaacagtccgtgttgtcgggctgtcaagacttccacgacggtgcggctaaccggaccgtgaagcgaagggacgaagccctaggcaaatactggatggaagaggtcggcaagcgagctgtcacccagccagaggcccgtgtgtgggctgacgctctggctgcgaaccgtcgtatcgaggagagcgtgaaattgcgccgccgacatgaccggatgaagggcatgtaagttttcctctcgcatttccaacatcctaggcttccaagctaatctgtgtacgatggtaccggctgcagcgctttccttgttttgcccttcgtcgcacttggcatcgttgccctgctgacgagcccctccatcggtgctatattatcgaccacatcctcgagcagccgaagtacctcgagccatacagctggattcactgccgacgaagtttccacacgacggcctgccggaccggccacagttggcctcgaaaaggagtgttcctccgaaacgaggtccaccggggcatcgctggtcctgataccgaatcatgttccttcggttatgttcgacaagaagtacccaaccttagccaacgagaccgccgcaacccgtgacgtccccctcaccaccaacattaccgatcgcggtaacccgatgggcaatcggatcgagcgattcgcatctgcccagcttctacagagctcaatgaccatagctgtatggtcatctcagcagttcgaagctggtcttcatgcagtccaggcggccattcatcgcgcctcggttgcgttgatcggtacgctagctgctgcccccaaaggcttcgcttttgctcgagcccgaatagatcgcttgttggctcccgcttggcagaggaccacctccctcgccatggccgatgggaaagatatataccggtcagcgctcctggatgctcatcgggccatgaagacctgtcgagacagtctgagtgtcgctcagactcgagcgattaaggacgcgaaagacgtgggagtcgccatggttgatctgctgtcccgtgggtccggtcgagtggactacgctcgtgaggcattacgagtgcgggcgtggggcaccctgcgcagtgcgcaagagatttccttgtctctcccaaggggaatcaagacgtctttgcatcgaccttcagtgatggttatcgacaagactcgtaagatgtcacaatctttacagagtcgtgtgacaagattgtcggggttggtcgagggtcgcgctcgaaggcttggtcgcgcacgctcaggcgacgaaacacgtaggcaacgcgggtcaggtgatgctcaaccacgacagcgcagggtgcaacctttcctccggcgtagacagaggggtaccggggtaggcaagcctcgatagagcaaagtgagtcgattcgcctcgagggcgatgtgaaccgtcgatctgaacgatccttagcccttcgaggtgacgactggtccaatcgccagtattgaccattgtgtccaacactgaccgccgccagcaagcgactttatgtactgcctctctcctatttgatctggttgtaggtatatccgaaaccgtttccaagttccacgtaccgtagctagtctcttgctctcttgagtggtccatccgtttcatccacgtgtatacaatccataatcattttgaagctgcatctcgtccatcgtacactgctaagcgccaggaacctttcgtcgatagatgtcaggtccacaaatgcaataactcgcgtagagcgggtttctctgttgaagcccgatgatcccgatgatgaacgaggttaatcgtggtgtgtgaattggtcaggtcaatgacagctcgtgtggataggatcatggagcagtatcgtggctgacgtcgttttctggccgtttggtctatgttcttgcgatctttacgccggagtctctcggaaaggcgattccacgctcggaaaacggagcggaccatgaggggcatgtcgatcgacaacgggcaggatgcagaagccaggccagtagcggagaagcaagccaatcctacgaaaccctctgcaggactcaccatgcagattatactacgtcgcgacctcctcgaagtgagctgaatactatgagccaaccagcctcaagagtccagcaatcacctctgaacccttgtaccgcacgcagaacctcgattggccagttggacctttaatggcacaagctgcacatgctgctacagctgtcctagttaagttccgagagcacgacagagtcacatcatacgagcaagatctcgacaatatgcgcaaggtgagaccattgtatcgcacggtcttttgcattcctgcaaggcaaagctcaccgctcacctcggtttctgccccacaggcgatcctccaggtcagctcaaggagcttgctgaacgacaccagctagagccttagacctaatcatcgctgccaataggttccagacgaggccgggattttggctctgagagatgacctcaaagcggctggaatcgaacattatctggtaagacaaaccagacatcacaagcgcttaccagttaacctgttcaactcgaatgcagtggactgagcagccgtgagtcaagaattggtgtctttggagccgtttgtagtcctgacaattacgtcgtatctcagcgagaactacccgacagcgctcgcgatcatacccaataagcgggagaagaagctgaagaaaatattggacaattgtaaggtcgagctctggcgataatcaccgattctacacgctcctggtgggaaagctttgggggacatgtgtatttctgtgattacgatgtagaacacaagaactttatggatacagttgcaagcgcatttctgactactgctttcctctgaatccgggccatttccaagcaggatctcgccaggcctttccgtatgcaatgacgatccagaatcccaggcaggacaatgccaacaaacctgagaagatggtgtaaagtcctccgtccccaatcgcattctgtatgcacaaattgatctcctcagttgggcgttgtgaagatgagcggagaggcagatacgtacgcggatagggagggcgacctgactcgccacaaaggcgaatgtgccccggaagaacgaattgcaagcgatggcgctgctcgaccgtcctgggttcgcgtctacgagataagcgagcgtcgacgcatatatgaccctggagcggcgagcgatgtcaaccggcgatcccggtccgacgaacttggtctgccacctacattatcgagaatcctccaaaaaccaaagcgacggtgggtccggccacgtttgtcgtttgatcactcgtccaggcgtatacgagaaaggaagctaccatgaccggcatcgctgtgacccggtgttcctcagcaacaacacaaatgctcgagcgaacacgatcgactaaccggggacggtacttttcaagcgcatctccggctctccgacacctccattcttgtcctttagcctttgcagcacccgatcgctataacgaccgccgagaatactacccaggacgttcccgccacctatgatacattgtcaatttgtgagttgagatgtggccattctgcgtcagggcggaatcgacttgccaaaagataagagcaacaatccgatcttaagcggggtatagtcgtagggtggactgtatagtcgcgagccgtcagcgcacagctacgcaagccaagcgcacaatcctgctcacgctgcgaatgtcacggcggctgtaaaggtgatggtgtattgagccgcaaagagcaagcctgtgaaagcaagatcgagtcagtgcggagtctggcgcagaccttctcgactggtcgcttcaccagagcaggtcacggccaaaaagttgttgggtcgtttcaagatgtgccacatggccggcgcagggtttacatcggtcaagctcagcttgactttgacgtgctgttcctcttcccgtgcggcagacatttcggtgcgccgcttattccaaggtttcattgtgctccagaatcgtcgacggggttcgaggacgacttctttcttctcaaggtccacttcgacttgacggtgttcaagaacctctggtgttggagtctgtacggtcgtcctctcggcaggagtcgcaatccccgatctcgatgccttgccggtcggcgtctggggtacggtcatcaagtcggctggagtctgatcgccgcttctcaatcccttttcccgcttcttgatccgcttcttctcgtcgtgagcgtcctgttccagggcccgcttgatcgctctctgtgtcgccttttggtatagctgcgatcgttcacgtctccagctgtccgggaaaaagatgaacgaggagaatgacgcgcctccaaatgccgccaagaggtagaatgtggcccgccaggacgacgccgatgtgaggattccaccgatgacgctgcgtggagggtaaacgttgtcagttcgcatctgcgatgtaattaacgacagactcacgatccgagagccggaccgatcagcgggacagcgtagtagactcccatctgcaaggcgaaacgaccgaatcagcgaacgtgttccgctgttccctaccggtggattcgacttgccttagttcctcgttcatgcttttcgtacatgtcggccaacgatcccgctcccacgctcaaaacggccgcactgccaaacccttgtaaaagtcgcactgagagagatgtcgttgatttcaaagtcagacatacatgtccaaggcatgccgagccacagcgacacttactgatgataaggacggtcatgttctcggctctactagcgacgagcgttccgacaatgaagatctgcaatcgtgaacgaggtaagaccctattcggccgctggtgtcgagaggaagatccatgacttacggcgttgctaacgagatagatgacctgtcgttgcgggagacgaaacgaagagcaaaaaatcagcccggggtgggagaggcaagacgagatcgtatcctcacctttctcccagtgacctcggcgatactggaccagactgcgagacgcgccgctcggtcacttagccaccctgcaacccatccttggcccaaactaccgcgactcacagatcggccaccctccctgaaataggatgaacaagctcacgctgagactcaattcggtatcggtggcgccaagttgttctctcagctgttcgaatgccgggttgtaaatggacgcgccgagggttggggagagggcagcaaaggcgaccatgacgaggacgacggtctaatccatcgacgacaataagttccgagacagggcggaaagagaggtcatcgagtgatattttgtcagcatgagcggactctggcgaacaacgcagcccagggcgtctctcacttttttacgctcgctccattccctcggatcgtcgtcgacgggaacatgttcgatatccaggacgacctgtttttccccggcttcttccaggtcgatattcggattcacttccatattcattccccccgtccgtgtcttagtagcagcaggtgagcctggtgtctcctcgtcatcgggatatgtcgacgaggtcggggggtaatgagtccggaccaccgagctgttccctgccgacgtcgtatcgacaccgaagcgctcgtcctgggcacagacatgccaatcgctaggcgtggtggaggaatttaccataccttccgtacccgatcggagcatgtcctgagcggggattgttgtagccctccggagttccgttcaagatgttattatggtcgtcggcctggtattataaggccgccgtagcaagcaagaggtatatcgtgtctggcctggtatcgcttcgtcttgaggctgagtattgagcaatagacacccgagtggggattatgagagatgatctgcttctttcgggttatatgtacgagagtgtggaatggtatggacgaagacagatgaatgcccgggtgttcgggatcccgaccgacaagtggcgcgatcgatgacctattatttctttgttatgattcgacaacgagggtgaggatgcgagagcagccagtcagggctagcattagaatgactcgaatgatgagatggatcgagaggacgatggtacgtagaggaatgggtgagtggatgatatcgggtttaccgacccctttctcccggaataagtctcgcatcgccgaacttttcggtcaaatccgaacgagaagacgagccaataaaagtggttaccaaaataggcaaggggcaagaggggtcaggtaatgacggcgacttgaaacaacaatgacctgggatcttgggttgtaaattgattcaagaatatgtgtttaacaatcgtgtgcaacaagatggggcaggaattccactagccgcgacattttagaagatcacgttccgtctcgacagacagatcgcctggatcgcctgccatcattccgctgctttttgtcgaggaatgtaaacaattcaaggcgttgcatcgcgtctcgtcaagctgccatccctcactctaggtggcctaccactctttgcgttctcatgtgtgatttgacgatgataggtagtgacaatgacaggcctgactgattgattgatcgatatgtgacggctagctctaattagttaggggtcgtgaccgtgaccgcggattgaaacgacgcgagtaagaggcaacgggcgaagcaggcaaggcagggcggggcggggaggagagcaagagcgaggtcttctcatctcatcattcttggcgcacagcccagagaaacgctagggaaggggagggaggtggaaagcaggtcatcatcatcatcatcatcatcatctcatcacgatcacgatcattccatcaatcatatttgatcaaatcaggtcaaatcaaggtcgttcaataatatatagactacttgctatttgagcatcctcctggcatcgatagaagtcagtggacttgcaacctagggacgcgatagatcgatcacacctcggcgaccaaaaggacggcgaattaggggggcatccttgagcttaaaccgtctaataaagcacaccgacgttcctaaaggtgagcgagccttccccgatcgctcgtgtcttcttgctctccacacccacaactacaccaccgttggtgccaatcctcgtcgatgacggctggtggctgactccccatcatatccatccgaagctcctattaccgcccgctctgcaacttcctagacgacagtagttgctagacaggacgcgcgcctcctacgctgcagctcgactcacaaggggatcgaatcccgccaaatgttctgatcgggaatcaagaggatcaagaaggacggaaggtagtgagcgtgtgtgacgctgttgtgactgagaggagccgcccggatccggggagcctgcaatcggctcgaacgttcatcctcaacattgccgtatctccgcaaccacgatgagcgctcccgacctcgataccctaggtcaggggaatgaaccgatcgagaacctcaatagtgccccgagtagcagctcgactgccgtagctgtgcacacgcaaccttcgaatcaggctgtcaatcgaccacatcctcgatccagcgtcatgagccatcatcaccatcaccaccaccatcaccggacaggggggaaacctggggtcaaccatcagaacgctaacaacaatggcaatgtgaggaaccatcaagccggacggcacaaccatcatcgagacgatcttcacccgaaccaaccgctcgccccggcccacgcttcctcctctaacgtccacctcgccgctgccgcctctgcccctcttcactcgtcgtcgatgaccaccacgtcatcttcctccttattcatggatccattccacacgttcgacacgctcgaccttcaaactccccgagcctttgtggtcgtcgtcgggctcatcctcttgggcgtcgcagggataaagtcgtaccaacacgtcgccaacaaggtccgacaacgacatcgtctgatcgagagcgaaaaagccgcagaggaattattgaggttgaacgtcaagcacggggtggtcgatctggacggacaggtcatcaagcccgggagtggggcgggcaacgcagggggtgcagcggcaggtactgcggggtcgaacaagagggaaggagatgccgcagatggaaagaagaggacgaggtcgggaacgttggaaaaggattccaaaacgcgatcgacgtccgataaccccgctcatcatgctacattgagcacctctgaaaaatctctcaagtcgaaaacgctcaatcccgagtctactcaacctgcccggtctgctgcgaccaccactattactaccgaccgggaggaggcaggccaggagcacagtatggagggaacgctaggcaaggccgctgcggctgccaagaacgaggccaaaaaggcgaaaaagaagatcaagagggcggccagattggaacagaggaagcattcgggggacctgttgatcgtcgatgccgaaggtgacgctgacgttgatgcggacgacgtcgaccttgacgtggtaaaggacaaacaaggagtcgaaaagcgggaggagcaggagcaggagcacggggtcacggtcgtgaatcaggtggagatcgacacgatggacgtcgaggccaacgtggaggcagatgaggatgagcagaattcggacgtcgatgccgaaggtattcagacagtcgaggcagaagagacgggtcaagacgagcctccagccgataccgtggtccaggtcgagggtgatccgaccctaaagtcgacacctgccgaagaagaaccgtcgcccatgccattcatccaaaacatgccctcgatcgagatccaacacatccccttgccggactcgcctccaccgtctcgactaggacgacgcgcatcagacgtcagcgattcggcggccagcctcttgagcggcgcctcgagcggattgtctggcaacccgaccttgcatcaacatctcgaacaatgtcacccaaccgagctcagcacacccagcgatcaacctcgacagaaacgcaagaaaaaggccaaggcattgtcgtcaacggcaacggcgacgacgggcatcaagcgggccgtccccggtgcggaaaattgggtcaaggagagccatgaagagagggaacgtgaggctaaagagcaactggtcaggcaggtcgagaaggctcgggctgccagtacctcggcggcagccaggacgagcaaggtcgaaaaggaaaatgagaccttgactgccaggctgcacaagctcgaatccaagctgtccaaggtgacttcctcccagcacgacttacgtgagcgggaaaagacggccttgtgggaaaaagaagaagcaatcaagcgggccaacgaggcacaatcggtcatgcagaattatcgcaaggtcgaggcttcgctcaagcacgacttgcaggtagccagaaaggagagagacaagacgtggcaagacgcacagcgtaaggaggccgatgtgagttattggtcgtggccgtgaattgcaaggaagggttgacgacggtcgctgatcttcgatcctatcgggttccaaaacagctacggtcacagcttcagcagatgaatgctcaactcgctcaagcggtacacagcgccgcctcgttcgaagccgcgctgcgatctacaggccgaatacctggtacgcccgtctttggagcaccggtacccctcatgtcatctcccgtcggcctgccaaatcatcacggacacatgctgctcggaaatccgcttccaaatcaatcacgaatgtccctgtccacgccaccctcgcctcaatctatgatgtccgccaacggactgccttggatcgaccgcaacaacatgcccagtccaggcggagcgccttcgcgaaaacgatccccctccgaagtattcgggttgccgatgatgcatcctctcagttctgcgacgacgccggtgagggaatcatccctcgcatggaccgtcttgaaaaacaagggcgagaacgggatcactaatccgcccgccaatctcaacccgaccgccaatgagtcgtcgaatgaacagccctctccagcaatccgtagtagatctggcacggtcggcaacgaaataccgaccgagaccagagacaaggagaatgaacccccgatcgagaatggcggatccatcgtatccgaatccaaatcgctgccgagcatcatcaagtccaagagggatgatgatgtcaaggacgtgcctgcactcgagaacgtggacgtccagaaggctcccgacagtcccgctgcagttgatggagaagaggaggttccctttttcgtctttccctccatacaccacgatccggaacacgtcaaggccgctatggctgagcggggtcgcagggcctccctacagcgggccacttctggcctatcggcattagcatccccctcggttagcccaggcaaaacgcccacgaagaaggtcgagctggatgatatcggcagcaacgatcacggcgaaatggccatctacgatcaatccagtacaacaagcatgacggatagccgcgggtcgaccgcgttttcgagcgagagtcagcatggcgatgatgcggcccgtctcgacattacctccctcaagcagcctgaactggctcgcgtcaacgaatcgccggagcaagcggcaccgatttccgtccagtagactttccgtagaattcccttctcttctctctttttatgaaccccttaacgataatctggactctgcattcgcttagtgtatataccatgtggcagacatatcatcatgatcgtgtcgtcaattcgacctttgatcgtgcgctctgcatggctcgaaggatctctgccgagcgaaatgcctgacgggactgaccaaagacgtgcaaagtaaaaaggtagacggggactcgaacaaggcaatggacaagtgaaagccgagcgatgctcgaagtcacaatgtagcagaatggcgagccacgactctcatgtgtgtttcggacccaaacccgtaaaagggcttgctttgggcgacggttatagacgattacatggaaacatctacgaaccaaacgatcacaagcaagatcccatggaaaaggatcctccatgcacacactcgcacctcccgacgaaaagagatgccgagtaggcgtgctctagcctggcgacaatgttgaccgagacttctccctctagacgacccactcctttctgatcccgtacgcaaggcgtgccgggatgattccaggtaagatgagcgaggtctctacaacctccgtcctcgtcgaccacccttcctcctggtagagtcggaaggaatgggggtgacgtcctcgatacgtccgatcctcatgccggatcgggcgagacctcggagagccgactgggcaccaggtccgggctgcttggtaccggtaccaccggtagcacggagcttaatgtggagggcggtgataccgacttccttgcacttggcggcgcactgctgcgaggccaacatggcggcgtaaggctgcgaaaggttgatgtggatgggatcagtatctgtcagtgagcaacaattgcgtctggtcgcgacacttaccgaagactcgtctcggtcggccttgacctgcattcctccggtgatacgggagatggtttcctttccggacaaatcagttacgtgaacgaaagtgtcgttgaaactgcaaagaattgttgaatttcacacgatgagcctcgtcgctcgctttgcatacggtccacaccgcactcacgaggcgaagatgtgagcaacaccgaaaaccaaaccatcgtccgactggggaccgaggttggtgacagcgttctccttgggttgcctgactttgggagcctgtgcagatggatcggttgaaaggatcagtttcgctccggctgcatgctcagacaccgctgtagcagactgaccattttgatagtcttcttgtcgtcgaaaaagaagtcggtgaagaaagaagctctgatcgtgacgttgaaggtgagattgatgatatggctcgatatcgcctttgagaggggacgtacggcactcgctaggtcggcagagcataagccccgggtccgcgaagaaaaaatgaacaacgaggaaaaggcgcgcaacgctcaagcgcgaactgagaagcgcaacaacgccaaaataaagcgcatcaccgtaccttctctgaaaggcccctgtcacgtagacctcactacgagctcaaatatgagtatagtgaagatgatgggcctatacactctacaatttcgatgggcatatgggccttgagttgatggcagcaaaaagttaagagaaggtggaaagggcagaatactggcgcgcgcgacacacgcgtcgcggccaaaaaaaaaagttatggagaaatggcgaatcgaacgccagacctttccaagataagctagatatgctaatggaatgttataccaactaaaccatatccccattgatgttcgtgactgtctaaatatacaatgatacaactgacatctgccgtgttcgcccggtcgaacctgccagggtttcatgtggatcttcatgccaaaggacttcctttccgcttcgacggcccgtcttcaaaggaagttcttccacttcctttgagacacgaacgctgggatctagtgacacaaaggttttcttgctgcctatatgcgcatctcgttcaatgtcatgttccgatagctcgcatataagtagctcaatgaaaacatgggtattttgctggaatactggacgcctagctccctggagggtgatgaccgtttgactctcgtttcgatacaccacaacctcgcgacatgtcctctgtagacatcgatagtgctagtctcgtctcggctggacagtattcgaaaagcaagaaatggctcctcatgacggtagtcatcagtctgggaatcgctaacgcgtttggggcgctcggtggtactatactactgggaccgactatacagaaggatatgaaaatgtctacagatgagttgcaatggcttacaacgagtttctacatcccgctggtacggtggatcgcatattcacatccaatatgattccgctctgcgactaaccccgtttcatttcggtgcacccgcaccgactcgcgtcgacagggctgtttctccctagtcactgggaaactagcggacatattcggtggcaaacggatgtgtttactaggcatggcaatcttcttgtcttgttcgactgcttcggggttcgtcaaagctatggaaccactcttcgtttgtcggggattctctggtctaggaagcgccatggcttcgacggccggatatcgtaagcacgaggcagaaagggaacgctagtattgcttcaacctgagttgcgcgtggctttcattcatagctatcatcacggacatttatccccaaggtaatgggagaacactcggtctagcactctacatcgcggcctggccgaccggggtcgggctggggacgatcgctgctggctatgtggcgtacgataactggcacaaatacttctatcttcacgggggtatatgcggagtcgcgatcttgatggtcttggtcattttgcccgacaaacatcctgatcatatcgactttttcggtcaaatcgattggctcggaaacttcctcgtttccgccggtgtcctcctgttgctctacgtactcagcatggcccccggtgctgacaaaggctgggcaactcctcgtaagcggtgtcaatgttaatgtgtgcttcccgtctattagtctgacgacaaatgctcccagacatgatcgccctcttgattttgtcgatcctgatcttggcggctttcgccgcatgggaatggtggatagagagacattctcgcacgcctcctctattacctttgagcgttttcgtgctagaccatggcagagtctccactctgtgccttatcgcggtgagtcagtccgtggctttcgcgcgtgagcaagtcgggctgacaacgatgattgcgatggttgatactgaagcctttcagcttcgctggtttctccggtttcatgcttctcactaccctatatttccaagaatacctcggaatgcctctaagggagactgccgtatgtccaacagaatcatctgccaaaacaacgatgagcattgagcccttccgccaaaacagcgtcatttcatacctggaccaataaggtcagtctctgtttgtattgattcaatttacactgatgtgctcaagcggccgtccaaatacagcggaacactctgcaatatattgattggatttatagcgccgagagtacctatccagtggattttggccgttggagcgctcgtgacaggactttcactgcttctattcgccgcgatgccagtgggggcctcgtactggggttatacattctttgcgatggtgagctctcttttgcaactcaatcacgaaaaggaccatgcttagaccaaacggtacgatggcgtcgcggaatttcatgagatgttttcggtggtcggcgcagatttcggtgagtcaggcaaaaacgattgacggcaagtcacacagatcattgcgtttggactgattgctgctttgacgattcgctctgagcagcgggttcagcgggcttgatctacatcacacagatggtcaagggccctacttcaggtatggctggaggtctattcaatacgatcatccagttcggaatgagtatgggcccatgcatagccacactcattcttcgtacgttaagtattcgatcgcccacaagccaccaagtagactcactgttgcgcaagcaggttacacatcggaagctcacgctcatcccggatccgatctgaattacgacgacgagggctttcctaaagagagctacctacatggtttgaaaagggcagggtatggtatcgctgcaatgtgcttctttggtaagtacggcgatatggtggtccttgcgatgggaatagagttgactgatgcatttcaatctgcctgacagccgcgcttgtcacgcccattgcactccgaggtatgggtcgacctcgtgtgcagcaaaatgaacccgagtctgtgcctgtcgagattcacccagcaggatcgatagacgaggatcaaagaatcgagaaccaggaggtcgatacaatggtgttaaagaaatagactgtctgaggattgtctgtctagcagacagaggaggctgtcgggcagaaagaaagcgtgggggcagcaggcacctcgggatttgtcggtttctcttcgatctatatgcgaagacctttgactgcatattggtaaaaccgttacgcacaaaaacagagtgccgaacgtgagagccagacttttccaggctcgtagtacggaggaatcatacgtatttgatgtatacaagggtcacaagagagatgtactgtgtgatccggacattatgatcattccgaatcgctctcaatgaactccttggatttgctacacatgtgaggtgacatcagtatagcatcaacgaacgatgttgtaccgtccagctcacaatttgcctcgcttggctggcttttcaggcatcaacggatcatcaccatccggatccaccgcagctgggcgcttcttcttgggtttaggcggttgctacgaaatcaaatcgctagttcagcttcccgtcttcccagcaacgccaatgccatgccactgaccttggatcttgaacgagacctggactgagatctcgactcggcaccgctgccagcagcttccgcctcgtcatcgggatctgcagccttcttccttccccgcttctttggcttcgtctccgcatcctctccgagaccttcgctaatgaagccatcttccgtcttctccttctttggctttttcgactttctcccttccttttgttccgcacgctctgcccggaccctgtcttcgtcttcctgagcagctcgcatctgttctctccaggcctgtgcttcttgtcgatgctgttcacgaatccttgcctcttcgtctcggcgagcttgctcttctgctcgacgagcttgctataagtcgagcaggaggccagacgttaaccccgagccctcacttcgatttaccttcaaagtccttacctcgatctgctcctgcttgcgtctctcttcctgtcgtcgtcgaacggcctcaaggtgccgctctgtttgctcattctcccacgtcgtttgcttctgcctctggtcgtccgcccgtcgcaagagaccctctccgtacttggatcgttgctcaaccagatctacatcatatggcaagggcctttcacgtgtctctgccaagttgcggaagattctaagcggtttgaaagtcattcagccgggtctcgagcaaatatgatgaccagtcggggaaccgagagactcacgtcgtcgagctctttgcctgctcgatgacctgctcgacttcctgaagtgaacgctttgaaggatcaagagcgaggatgacctcagccgtcttttgctggatcatggcaatattgtgcaagatggccaaatcgtgaggcttcaaatgagccgccttcatgcaatgactgagtgccttgctcatggcaggaaagttcgactcccgactgccaagttgatagtatgcccgagcgaggaataacagcaccgaggtgtcttggcctttgaccaaatcagatgcggcggagtactggagggcaatgtgaagtgagcaggacataacagcggagggccaaatgcggctggttacgcactgcttcaatcgcctgctcctcgtcgcccttgaagaattgacagtgcccgatgttaatgagtacacttcggtccggcaaacaatcgcggatccggttgaaaatgccaagtgccatgtcgaggctcttgctcttgaccacgacaccttgcgaatccgtagctccgttggtggcacccttacgcgacggcaggtgctcctcggcgatggcaatggcaagcccttgtgcagcaacggcacacttgggatccacttccagtgctcggttgtaagcctcggccgaacggacaaagtcccttgctcgctcggcttcagagccctttgactctcgagcgcagtgatagtggtaagctcccagagcgcacaaggcatggacgtcgtcctgattagcccgcctcgtttgtgatgcaaagtcggaagcatctttccatttttcttgcatgatgaggtgatgcgtgatttgagcccgaagcaagggatccttgttgtacgacgcgttggcttctttcaagaggttctcctgctccttgaagttacctgccatgtgcgtgagagtagcctttcgcagtttcgctgtacatcgtcaagacgtcgtgtgatcagatgagagagctcgttagccagatcggacgcccacttacctggtagatgttctgggtgcctggccaatagtccggtaaagagctcgtccgctttgacattctccttcgcctcttcatatgccctacccaagttgtacagcaacacagtctgcagagttttctcttcgtcgttcgtgacctcgcctagatcctccagcatctgctcgaacatttgcatagcctcgtcgacattcttctgaccaaggtagagcgctcccaggttgtttgacatttgtaaccccgacaggtctcgagtgtgcgcctcgatatcgatcaccgactcgcccttgttacccttgacccttccatgaatttcaatggccgtctgataggcctcgatcgccttttcgacattttcgtgctgccacatcttggctagctgcacaaaaatcaaggggtcatcgaccaagtctctcaaagcgtgaacgcgagtttctcccttggcgaggcgacccttggcgagcttgtacgtgtcgtgaatcctactgagaatatcacgagctcgtttcgtgttggcagtcaactcgccggctgacatacccgggtgaggaaaggccaataggagagcatgaagtacccggagttcgtgaggagcgttcttgtcgagcttgctgacagcaatgtcgacgacgttcagcgcttctcgatagaaagcggtccctgcaagccgtaacgaggatgatcagcgaaatgtccccgaatcgattttccacgagtatactaaccagatttgatgaaaacttgagctctcacaatctcggctacggcgtccggtaccggatccgttcgaagcttttgagaataggtctcgacgtcgccgtcttctccctcgacgaacgcaagacgacacctctctgaaagcgctcgtcgtgtatgagcagcggtgtcggcgtattgtatcgcacgttccgtcagtttgatagcctggagcgagtaccagacgtaggtcaacttggttgtcgtgcactgtccctcgcgatggcttactttggcgatctgtccctggatctcggcattcctgacgatacccaaagcggcagggacgaccttgccggcactctcggaaaagagctgtccgaacatcttggtcgccgtgatttgcttgttcctccgctcatcggccggggaagacaggttcttggcatcgttgtgatcgatcagacccagcaagaatcgtgcgcctcgattcttggggttctgcgagcgatgaaagcgaccgtgagcatggatgtgacctcgaactgatgtaaacttggacgtaccagggcgatggctcgcttccatgccgcagtcccctttttcgtatctcccagtagccaaaaactaagacccagcccgactcgagggtccattccgactccctgctccaatgccatcctcatggccccgtccagacctcctcggggaccattcgcggaaggtacaccgaacttgggggaaagctggaggacctgttggtacgcctttagcgcttgctccgctcttcgcgtttgcaggtagagtcgaccagagagcattagaaccaggaggttgttgggttggctcttgaggcagagagatacgaggtgatcggcttgcgtaaagtctcttcgagcgagtgccaagagggctagaacagcgacgagtggttgagcatcagcatcagcatctcgcatccactgctgcctgaccggaggcaggacccacctttgcccatccacaagcccagcctagcctttccggcctctcccggttgaagcctcggcaattgttccagagctacgtccgcccgtctgaaacagtctgccgcgatctggtagtagctcgcggcagccttgacgtgaaagtcaagatggtcgtactctgcccatccgacaagagtcagcgtggatcagtccgacttcgagtctttggtactgacttgcttcgcccaagacggtcttgggggcctctcgagctcgaacgagggcgaggtaaccttgcatggcgagcgcgtcgatcgtgccagatggattaggcgtcgaccggtccgcaaagttctctagcaacaccaggggcgcgtgatcgagtatgagcgatctggattgcattgcatggatgcgataaatccgggatatgctcaccattgatggcaaagctgagcaattcatcggcggtatctatccgaccggctcgagcgtattctccagcaatcaacatccaactcttcggctgggctttcagactggtcaatacccgcagaccgatgttctcggtggaagacaagagctggttgacatcgagatcgacggcttccccactgttcgtcattcgacgggccaagagtgtcagcacgagatcatggtcgacgagtttcgttcgagatatcactgacctggcgtcaaagaggtcgacgagcctctcctcttcgatgtcttgcgactcgtcgacgtcgatcggtttctgatcctctgtcatattgtgagatgagagagactctctacagcctttgagcttgtctggcgaggtggaccgaaacgattcaagcggttcaagatgtcactgcctcgtcatgaatagctcaaatggtgtcgaatccccgaagcccaaccgggatttggtctctcgctcgagtaagtaggatcgattgaagtgaccccatttgttctttatttccaccttttcataccgacccgaacgactcactcaacaaccattcaaacagtttggtgacgattctgatactctgagcatgatcaggcccaattatacggtactcgcatagaaaacagctgctctgtgtcggcaattttttttccagtataatggaaccctgggataccgggccatgacatccttctgagctcgaaagaaatgtccgcgcagagagatccacgaagactactgtcgggaatgccgctcgaaattattatccgtctatgcagacgtgaaaagtaccgttatataacttacagacactaaggtttggaactcgaatcaaaggcgatgggaggtaaagatctggtcgtggtctcacagtatagggcgcaggcacgcgtcgactgtcatcactcgccttttttcgcctcgctatgatccattgatcgagtggtggagatcaaggtattagcacataaccggcgatatatccgagactttggatacacagtgacgcctagcccctccgtggattgccaaccagcgtgtctgctgatccaacccgatatcccactctcagcctccatctttaagcgcagtctgaatccgaggtctaggactaccctaggaatccccacctcgtagcatcctcggccaagcccctgcgcccgtagagtcaatcttatcgattcttccctcggatgaccaaggcgacttggacgacgagcgccattccgaggcttaggaggttttgatcagatatacgtatgggcacgtactcgatgtccacatatactcatactcatacgcccgtcccgcccgtggcggcgtgcgatagtgggaaagatgaaacgacctcttcgatttcccctccaataataatgataatatgtatgtagttgagattcggtacgatcatcctttccttctgatggctttgcgccgtttgggtaggtgggtaggatgagttctgcgctctgtctctaccagtgtgtagttgggtagtgagcgtctttgcctaaattagcttccgtccctctcctccccctgcccctgccctcccttgccctgttgccctgtgtctttcacgcgcgggcgacgtcatttattattacaaaacgagtcaaacgagtcgcgagtcgggacgaggtcgttatctcacaatcatcatcatctcaatcaccacttggacttcatcgcaaaagctaacctactattgccgactacatcttcccacacaacttcacactttatcctcaacccctcctgcatcatgtcattcacacaccccgatgcagtgccctcggcgcccaacccggccatggccacacaggacgtgtccatgttcaccaataccgacccagagaccagggacgattcgagggatccttggaagttcgaggtgagcaccgggtgtgaatcaaccgagtgggatgtcgggacgagtgggaccggtttggtctttcccttcttcccccaccgctggtcgattggatgaaaagcgggagacaagtccgtcttgatagatctagttgcatcctagacctgactacgacccgtcctgcccgcatttccctcctcctgccatagcaccatgaacagactaaagactgacccccacctttcttttctatcacctcgcatccccctcagtccctgacaggcttcttcctcttcaacgagccctctgcagagatctccacgcacatgaccgtccacggcccagggtcgacctttggattactaaaacagcccgtcgacgaggctggggaaaagcaggaggaagggttgtgggggtgggaaggcgtcaagaagcgggtagagggtgagtctgctttggtccccgtcctcgtccgggttgggagctaggcggtgtggctatgatggggatgtgcgggtcgttcatgctatcgtgaccagaagtgaagcggtactgatcgtttcgattccacctcttcaccacatcttgcccctcccactcatgcctgaacaatactgggattcgtgctggactgtcgatcgtgcttgactccaacttggacatcccaatcgtcaatccgggatcactttctacgtaaaaccaaaaaccatggatgacgcattgcaacctaaaccgccatatcccttactgaattgcaaccaccaacctctcaacgttgaaaccggccctcgaacaaatcccttgaccaaaccgaattgcatccacttgcggcaaacagagctacaagcctcggctccgcctgacgtcaaatacaagctcttgttctgcggtgagcatttcgattccggtcccgctcgtcccctcttcgaaaaccatcctctgcggtgacgccgcacctggggagatccgatgggtcttccgggatcgcaaaaggtcgtcaccccgacgaggatcgtccgcagctacctacctcccttgatctggacggtacaacccttttgcgtcgcatcgctcattcaagcttttctttcgcttttctttcctttctttatcattttccgctcccccttcacgtcaacgcttgataccgttccactgctcgtcgcaaaacggcacgtctgggatcttgacaacgcccctcgacgggaactgcctcgatggacacgacgggcttgatggacgttcatgcggattttcatctcatgcactgcgcaatgctacgatacaccaacatgcatcgacctacgcccctacccgatcttgaccggccggcgttcttggaccggaaatcgcaactctttgtggacctgttgaaatgggaccgttctgcggtggtcgcaccgcggcgacacgtgctggtcggtatacatgtctatatcgttggcaaacgtaggacgacacgctcaaggatggcacaacgtcgctagcgaaaagtacccccaggctgtcagtacattatcgttcctcatatcctgcacaccacggagcgagggctgattttggcgtgttcgtagctctgggacggcgattacgctaaacgaacgaccgacggcgagattgtctggggacccgatgccgaactgacaccgttgggacaacaacaggcgatcgcaagtctcaccgcacgcatccctgggtagtttccgggtgaattaaccgcagacctcttttgatagaccctgcacgaggcatggaaatccaacctggctgctgggtgtcccaagcctgaaaagtggctctgttccccgttcacccgaacggcggatacgatgagactcagctttggcgacgtgttgaagggagaaaagcccgtgttcgtcgaggcaagttcaggacgctcgtgtcgagcgacttcaggactgtcaagagaaacgggtttctgacgaccgtgaacgaaaaacagaacctgagagagattttcggggagcagacgtgtgatcagaggaggtccaaggtgagcaaaagatgggcagtcgattcgcttgggcgagcgttgatcacgtctcgtcgtagtcgtacctcgccgagcgattcccagactacgacttcgaagccggatttgccgaggaggatcctctgtggaaagctggtgagtgtggattcgcctgggtcaatgatccttgatgattcgagagctagtcgctcgagtagtctcgatcacccaacccgactagctctcgattcacgaaatgatccgactagcgcagaaatccgggttcaacttgacaaccagctgaccgggtacatctcggtgactgtccttcagatgagcgcgagcttgaagtcaatcgacgggttcgagtgagggaacaattgtaccgcatctttgacggttgtgacgagacgtgtgagtcgccgctaattctcccccatcgccgggtccgcacagatgggcgagctaattcgactcgacctgattcgtcccacatccgctagacatctcgatcacctcgcacgcatgctcgaccttgtcgctatgcgccgttttgaggcataggatcttcaagctgggaacgtcgggcatgatcccagtcgtcgtcaaggcgactcgcaacaaggccgcgtgaggaggtcagcatcgcggcgcgcaaggtcgctccattgcgcagtacagaaggaataggaattcgaggtggaccgaaaaagtagatgcgtgttagatgagagtgtatttttgggtacatgggtcgctacagcatggccgttctcccctttgcttccagccaagcggcgccgcaagcttcgctttttcatttctcttctctgtttcctttttacagatcgcgacctcggcgatctcacgcgaggcccccggagtgacccactcgaagaagggtggtccggcggggtcatgtgactgcacggcgggtcttggtccgcgtaagcgaaagacattgggttcggggggaggcccgaacggcgatcgtacgcccagatctcctcgaggtcgtcccgacggatcgcaacggatgaatgtggaataatcgaaaccgatgaccaatagtctacatgtccgggaacttcgggggacccatcgattgtttcgatcggggattgtgcgacagggagaaaccacagtcgctgcgaaaaaaaaacacgacttgggacctgcgctgatccccgctcaaaccttggggtctggtgagagcaaaggcggagaagatgtcatccactcgaaaaaaaccccttgggatccccggcttcacatgtgcggaaagacatcggggaatgaggcttacccgagtcgacgactgatcccgatggcgactgatggcgatcgaaaaacctgagatcgtcatcttattggtcgagcttccgaacgagagtgacggttgcctagcgagcaatcacggtcgaaccctaattccgtcctctcgcgtttactcgccttgtccttgtgtctctttcgatgtgccccgccatttttcgcttcgcttttggttctttcccctaaccgggatcaggtgttcacatgctgacccatcgttaccgtgtcccaccccgatccagacatgtgatgatgctcgctgcagacggcacacatcaaaggctccatgcggaacctgagccaggggaaaggcgactcaagccattcaccgggtggaggtaattcctgcttcggggtcaagcgggacgttcgccgcggggagttcggcaggcgagccacggggccaaggcgcgcggatgacagctgctttcgtgttccgccctgcggacgacaccatccatgacgaggggaaacggggggcacggtctggggcaccggcatcacatacgcgcggagaatttcacttggcgccatcagatcagggaggcggcatagtagtagagtagtttcaccaatacaaaggatggaaacacaagaaggagcgaggttggcaggggggagggggtcaggagatcaggagacaatcaatgaaaagaagttggtggttccatgacgcttcacgatgacgagacaagcgatgtcaaccaaccatcgtggaggaggcggcgcgttctttgttattgtttttattgcgattgtactgttcttctggttgtcgacacgattaccccacgctagagtggcgtaaaacccccggggaaacgatgacgttcgtgggctgagtaaaatgaacaacttcgacatcggtccgatccgatcatggtcctcatcctgactattcttcgacacagccaagtcacccgcaggatggccagttcgtaacgctcaaagttactgcttttgacgtcgtgtatcataagcgatcatgcccaggtctagaaaaatatccatcagaatggcaggaagcaatgcaacctcgcagcggacagcccgagcacatcatccgttcacccagtaccgtcctggtgctacctttgaccctgatatgctatttttgctcgtccatcctcggagcagaaaggacaaccgagtcgcaaccaagttgctgatcaagtcgcaggcattcccggtaagaaaagcatccgatcgggatttgttttttggttccggaggatatttcaacgcaaagtaggcaagctcgagcagctagcagggtgggtctcgtcgcttttagatagatcttctcggcttgctgtatcctctgctagctctacagccttgacagaccacaaacacaaataaattgtttctgtatttccgttcgttctccggtatgaccgtgtccctcgtccttcccggtacggtcgccgccccacttcgaaccccgcacatcctcctctacaccctaggcaactatacgcacccatccaccaaacattccttgggacaacacgtcatccccagcctactccggcgattcgacttgccgaaggaaggggatttcttgagattggagaggaagcacgattgttggttgggtagcgggatgatccgtacgtcagggcgaggagacggggaggggcaggggttcaggttgtccatcgccaagcctcgtgagtctagccacaggtccgggggttgcctgtcatccgggggtctgaccgatggataccattaccgacgtctgttgcttcgcaggcctgctgatgaacatcaacggtcgacccgtgcccttcctgctcaaatccctcgcccagtcgttccctcaacatccctccccgaccctcatcgcgttgcacgacaacctcaccctccctcccctctccgtcggcaaaccccgctcgggtgtcacccaccagggacacggcgggctgagctcgatagaatccagcttgaaatccaaggatttctggagactcgggttggggatcggacggggtgggaacgggccgggaggaggcgtggtcaagtgggtcttgagcgagttgtccagggaggaaaaagggtattgggatggaggtgaaggggtggaacggatcgccgatgtcattttcgacatggcggcgaggctgagaaaggcagactcgcccaagatcaaggtcgccaaaaagtagagtccgacgatttggccaggagtgggaaaggaatgcattgagccgtccggaccgacaatctcacggcgtgcagtgagattcaaccatcctcgatacttcggaccttgggacaggaaccctgccgagcgagacgcgatgcagtttacacgccggacatcgtgttcaacatggtgtcaagaagacagggccccctctcttctgtacttactgtactctggaccgcttggatccttcactacacactcggccgaagggtgccgctaagacgagcctgcgtaccaggcgatagggctcgtcaaccatacccggaccccttcaatgcacccgccccggaaattagcctgcacatatctccggctcaacctggtgcgaagcgtcgtcgttccgtccgagtctagcgtgtgactcgcacggatcaccggtctaggaacgccacggatcgcttgacagctgggacgatcgatgacatgccagacagagaaaccaatcagtccttatcggtgaacgtcgaggcaaatttattcgagcccagctcgatgtgaaagggggaatgacggcacctcaaaggaagctcgactgaagggatcctgacggaactcttcgctcatgcgcatcgtcagtgacgacgaaaggcaaccacgatagggctcaaccgtcgaagaaaggaactcgacagagactgatcggcgtctcgatcggcgacggacaagttctctggtccgcaagagcccgattacagggcggccacaagtggaataccgcgcagtctcgcgtacctcgagtttgcgaaattttaatcgcatccgtgatctagcttgtactagagctcccagcctgaagagcgagaagtggtactcggcgcgacatgacaagtgtaaaggccgagtaccgaactggctctctctcgcatctatgtgtgtatatggcaaatcgaatccaccgaagagcgccgatggataaaagtacaaatacagtcgtagagactcctatttcgacatcgagcagtgacagaacagtgaggtcatcctagcggtttgaaccatcggtgagggccccggtgatccctagacatctaagcgcgcgaatcgtggtaccagagcaccgagtagacgatcgagaatgctccgtaaaatgagcacaggaggaccgacatgagctacgagaacgctcccccacccgccgaatgatcagctctctccacccgcgggacgacgacccgtgtctgctcacctttcttgtcccattgtaatagaactgtttgctcttcccgatattcttgtccatgtttaccacctgtcccaatccgatcaagctgttcaacctgaccccgacgagcacgcagctgagcacgccaaagacgagacaggtcaacgcccaggggaaaaagtgcggtcggacgatccgggggtacttgttcgtcccgtgggtggggatgaaaagggggacgaggatgaaagtgatcccgatgggtacgatggggaggagtccgatcccgagcttggcttgatccaggcgaactggatggaccgggcgacccggggcgtgtgtgtcaggtcttggtctacgcagcgttcccactcggtttgggaaacacacccgcatactcactcatttcgtacacctggactgcgaacgccgctaacaacaagacggcgcaaaggacggccaacccgaacctgaaaccggatttggactgcctcttctccctctctgcgcggtaagagtggatggcttccctatcgacgccggacccgcctttcgagttgtagtcttgcaggggcacacctgtaacgcgagaatgaaaagcatgtcaatatcgacttgctcaactcaggtagatcgaattgatactcggcaaagggctgtgactcactctcggccttttgacccgggtgtcgactccggatggcgaaacaaaaggggaacatgaggatggccaacagagccgcgagggggacgaggaagacgtcggtcgtgcatgtcgtcaagtacctgcaagccagtggattgtcggagcgtcagcggtctgtttcaagcgggtaccacaagtcgtggttcgcgagatggagcgagaaggctatcgcactttttatgcagaccctagattgttcgacaggggacttgggtgaatcagccaactgaacatgcttgagcgtcgtccgagaatgtgcaaaggacatacgattcccttatcgggtcgattggtacagatcccggacatttcgtcgaagagagctctgtcttattccccacgtctatttcctcgagatcgtcccgagcagcagtcgagaagaatgtcgtggtcgatgatggaatgcaaaatcaattcgttcgttagccagcagtttcaaggtaggccaggtattctaggagactgcaatacgaacgattggatggttgctttcccaactcggtcgtctcgcgcaatcgtagtcttggtaggttgctcgctcgcttgcttgtctctatgcttgttcctcccgcgagctactcgatccgagatccgtagactagcaactggtcacaaggcacgctaagaattgcgctcgtggtccgatctcttggtgactgttcaccagccagtctcgctttcctttgcttggtcgaatcgctagctcggtcctcaggggagagacctgttcaacttttgaagatttctagggttcgacacagcacggcagaacgtaggaaacacgcgcgggaaccatcggatgcttttgtctttgttctctcctctgggatctcggccagatcacatgtttgatccgtctatccgcgaatgactcttgccccgactgttcaaggactgttgagcggatacgggtcagcagatcaggagagtcatcgatttactctgcatgactgtgtatgtgcgtaagacttatcgaccaggggtcagacgcaacgattgtgtgtaggtgggtggtacttattcagccttgaggaaatcgagggtcattcccgagacatcacccctggcctggcgcttcggatccagattacggccacgtcatcccgccgcttcgaggcgccatacccctttggcccgcccgagggtcattgaccgaggacgcctcccctcccccccccatcccgcgaacgtttgttgacgtttcatctttacccatttattcgcccaagcctcaatcaaacggttcatcaatcgatcaatcacgcaattggatcggaacaaggctggatcgagacaataacgttgatcggtgttctacatcgtctctcttaatctccccctctgtttcgtggtggtgggcacgaggcgtttcatcccttgatcgttgtcatctcgcaccggctgtcatcaacgatggggcccggggcaggcttgagtgagagcagcatctagatcgaaacaccatcatcaacattatcaacatcagcgtcattataggcgatcactgttggtcggacggtgttgatttgttgttgtttacttttgtcgaggactcacgacaaggggagatacaaagtcggacaacgacgactattcatagtgatcgtcgatccttcttttgatttcccaatgacagcggcgttatcgattcgtggttgaacatctcggacaatcataggtccaggaaaccgaccgcatccagcattgacatagcacttctgtaatcgcaacatgggacacgaagataaaggcagggacgctacgtattcgactccactcccacctccccgtccttccttcaactacgcggcaagaccttcgacagatagtatcaggtcacttgcagatcattcttattcacccttggtaagccctggtctatggctgctgcgagtagtctcgactgactccgcttggactcgatttcgaacagtttaccaacgggctctacaattcgtccatcatggacctgcaccgtcctaaccctccttcccctccagctcccgctgaacatctcgtcggaacctatcccaacctcccggacccttcgacgttttccacgccggccaagaaaaagtccagctcctcgttgatcagctcgttgggatccaaatcacccttttcgaggaggaggacgcggaaacagtcttcgacgaccatcaccgagcagtcgacactgatcaatcatcattcgaactgcggcagcaataataataccccggggaagaacagctcggggtcctctcagagtagtttgagagccagtccggggaagaggacgagcccgtacaagagcccgttggggaaacagccgggggcgagctggaagcgcagggaaaaagagaccgagctccggggtgtcgagatttcttcaatgggggcgtatcagggcaacaaggggaaatcgagcaccgtggggtccgtcttgcaaggggaattcctcaggtctcctcgaccactgcagatgggcaaggacctcgatgtgttccgcactagaggagccattgacgatcgcggtgatcatgatcaaggggatgtcgagatgatagatgtcgagatcgacgtcgaccctgccatggacttgcaaaacgacatttccgcactcgagacgatcaatgggatgttgggacttcctatcgaaaaatcgagaccggcgcatgtgcccaagaagaagaggtctttgttgggtttcgcggccaggggcgggagcaaggttccgtttgtcgacgaggagggcaaggggatgggagagtcggtaggtaggaagagcggcgggtgggtcagggttagcatggaacatttctcgtgagtgttcgcttcgatgatcgtgcacaagatgtcgggattgacgtgaacatcaatgtagccgcgatgcaccgacacctccaccgatgactccgctgcctcctctacctcaaaagatgatggacaagctcgcgctcaactctccatccaccactaacgctggcgtcgcccgcgagccatccccgaacgactcgggtcgtcgaaccaacctcaagcccttccgacttcgaagcttattgaacctcaacatgcatatgggcacccccaagaagcaacagtcgacggcctcgcagatgcacgcttctccagcgagtttcgtcggcggtggacggtactcgcccggggaatctccttcggacgatcacgcgccgttttcgagcatcgtcgacaagtttcacacgaggaacgaaccgcaagaacgggcagggttggagttgccccctagaccgggcacgagcttgggattgtgtacccccaagaaacagatcatccctatcaatcggtcgggatcgaacgctcttggcatcactagtaatgcttccactccagtcttgggtctacctatgagtaatcaatcccactggagcaacgctaacccggttcaggggaggaacaagatgagcatgggaccgaatggaaggatgccccctcctcgccccagctcgagaccgtcttggggtcccgaaaagatccttgcaggtaggcctaggctgagcgagagtagggaacgggccttgtccccgaccctgatcggaaggatgaatacggagaacccgcagtcttccctctcgtctcgaaccaagatccccttgttgcctcgatcgagctcgaacaccatcttgtccgatcgatccaacgcggacaagcgcgccgggaaagtgtttggcgggaaagcagagagccctaccgacggtctacccttcaagaatggggatggctggagcactccttatcccattagcgagagtgtagacatcgagatcggaaaattggacatggggtaccctttccccgccatacccatgatcaagagccgctcgtccagtcgggcgcccatactcgaatcggccaagacgcgggaccccggcaagaccgctcgaagtcggttcgactcgagcgcgttcgagtaccaagctttcgagaccgatcacttgctcggacgcgctgggaaagagtctcgggaatcttccccgccactctcgggaacgtctgggtacgagacgaccaaatcgagcgggatgcttcctagccgacccgggtcaaccatccgcgaggtcaacgacgacaaggagaaccaaggcgggagcggtaagaagaatgctcagggcggggcaacgactttcggtcgaagtcgacctttacctgccatcttccatggaggccgcgagagccggggcacaatgcgcgggtgatcttcgacgacctgtcacgtcaatgcttgtctcatctttctcaacagtctcatcactttccttccagctcatcacgttctagccttaggattctttttgccgtcccttacgtgtatactttctgctgtaccattctgttcttgctgctcgccgtaatgaccataccatctcaccctctctccatctcacttgaaacgcctgttcacttgggcccggatatgcgcgtcgctctcgctgggggtctttgtaaacaaacccccaaagtcggacatcatcatcctcggccaacctcgaaggtcgattcggtcatacatactcgaccacaagagctcttcacgagtcgtgacttttgccaaagtgccacagtcgatcacactcgccattagtgttatagcatagatcccagcctagtgacaagaaactcggaatgccggacgcgtcctcgcccctcaacgaggacaacgtagccgaagccttgcaagggatcaaggatgctcgtcagtctaccgagagagcctggctgctcggcgtttcatcatcccgctcagcaattttgtcgtcttctcagaacctcaaaagaaagccgatatcgttcaggtgtttgccttgcggctggacgccggtccagaggttagtctataacaatatcgaccggggtcaatagtcaggaagctgatattcccgcatctcattcctttagctgtcagccacatcgatcgacgccatcaccctctcaatcccaccactactagcttcacccagcccagcccttctgacgccggtcttgttctcgctcatcccagcccagatcaagctggtcgccgacaacgatgtcacgccacaaaaagatcgagctcgattgctcgtccagaccttgttatctccgctcctggaacgaatgaacgatgccaaagatcgtatccacgcacccgccgtggataacatcatcgctctcggtctggccatctacaacggctcgggctcgaacaggtctggacccgagtcggggtcttcggaaggtaccacctcgaccggatcgaacaagggcaaagagagggagacggttcagcaattgtatgagaggctgctcatcaataccatggagggcaagtcccctcgagggaaagtcggcgggatgaaggtcgtcgtgggtatcagagagaagagcggggcgttgggtttgaggccgttcatgccgctgttggccgggttcttggaggatggagacagcgcggtacgggaaggtgcaaggacggtacgtcgccatggctccctgtacgagaccgtacaatgactaatctcgcgcacctgatcatgttgtcgtgacgtatagagcttggtatctttgctttcctcgccatcgacgccgctctcagctcgagccgaattgaaaaagctcatgcaatcccggaatatcaagacgacgaccatcgagtccctcttggaccagatcaacaaggccgccgcgcagatagtcaatggcgaagctcgacccagtcctagtcggaatgtgagcggggtatcgacaggaggagcgaggtcgagggttgtttcgagcaagagcgtcggcatgatggacgatgtcgagattccaccggtttacgtgagtctaaggggtgtgtacgcacatactggacgaaactcaccgccacgtcgagctgtagatatcaacgtcgcgagagttggaaagcgaattcaattcgttcttgcccgctttcgaggtaaggcaacatggtgatgcgagtcttcgtggcatggctctgactcgtatccctgcattcgactcagggcaaagagaccgaacataattggattcagcgagagagggcgatttcgagagttcgcgggatgctcgtgaccggagtgcatcgtcaactacaggcagctttcatctcgacattgcgtgcctcgtttctgagcgtttcgaccaaagcggtaagtttcgagtgcaacacagctttggcgttgagtattagacctgaatgtttttgcgtttgcagcttgcgagtctgcgaacgaccttgtccgtgctcaccatcggaatgtacaaggacttgctggaagagctaggtacggctttcgatacgctggtcgattccatcttgtcccctctcgcaaaactctcgggcgcgaccaaaaagattaccgccgagaattcgcaaaacaccgtcggcctgatcatcaagaagaccacgtgcccgcccaagacattcataccattcctctccctcggcgcccatgaaaaggcgcctcaagttcgtggatactacgcgaggcacctaaaagaatacatcgacaagcataatggcaaccggagcccagcatggagcgtcgaacacataaactctgtgatcgacatgcttaaacaccttttgggagatggtactccggctgtcagggaaaccgccagactagccttctggacgttcaccgttcgataccagagcgaggccgaaagccttctcaacagccttgacgatggcgctaggaagcaactggaaaaggtgaaaccggcgccagggatagcgtcagccgtcgagcgggtagaagccagcgtagctacaatctctgtcccagaggtggccaaggagcgaaaaccagtatcaaacatgatggccgaaatgaagcggaaaaaaatggcggccatgagggcattggcaaccagcagatcttcgaacgaggacatgctgcttcctgagacagactcgaatccgaccgcgccgagttctcctgcaagaccggactctacacctcccgtccgcgtggtgtcgcccgcgaagcgagctactcaaatagtcccggtcgaaacatcgatacctctcaaatcctctcgaacgtccttgccaagagcagcttcatcccctcaaattgaacgcaagctattgccgcgctctccagcacgagtgcccctcccagagtcacctatcttgatcgacctagagtcgagaaggaaccgacagccgtccacgatcgtctctccacctgtacctgcgccggatccgttcgaagacgtctttacgtcgagtgttccggaaaccggcgccggtgtcgataggatacaggcagacttggctagccttaggtttgctccagagaccacccgcgacaaacccatcgtcgaacgagcgtccgagttgcccccttcccgtatgaccgagtcaagtatgcgagaggagccgatgctacctcttgccctgacagttcccgacataatccaggatacgactgtcagcacaagcgacacaaggtcggctagatccgcaccaaatatagaggtggagtcggtcattccgagcgcaacgcaagatcaatttggcaccgggacaaattgcccaaaatgggaccccgctgcgcagtcttatcgcacaccgccattcagtgattgtaccctttggctagaagctgttcgggctgaagagaagcgtcatttcagccaggaggatcacgagaccaccatcacatcgtaccagaaggctgcaaagacaagtttggtcacgcccgagatgctgtcagaagtattccgcggcctggtgcacgttgcgcttcaacgacacggttcgataggaagtcccacaggtgtggacggtgtccggcagttgttcgatctcgatgcaagtacatcgcgagtcagcgtcggggaacaaattgcatcggagatgatcgaaaacgccggtcgtcaattgagccgtcacacggtaggtactgcctgattgcatggtcttggaccaacgcctgatcgtcgatcctgcctcttatcaggacattaaattagccgatgcatacctccttctcctctggcaagtatgcatcagacaccgtcaggtttgcgatcaagcggaccacttcatagtgtccggcttgttcgcattatatcgagcagacgagagtcgagtgagtcgcgggagtcagtaacagatcaagtctgagacgtggaccgacggctcttttcttttcagatgcgtcgtccagctgcagctctcctggccatctggggccaaatgacccccaacccaatcggcctccttcacaacgagttgtcagaggcagatatgctattgcagggaggagagcaagagcagtggaaggtcttgttcttcgccacaatggcagtggcagtgctcgtactccgtctgcctggagccgtcttgcgggaacaatcgccccggatgaggaatctcatcgtctcggtacgttcgtttggtcgccatccgcggcatgaatgtggcacggccttggcttatcgaccggactgatgcgctcggcagggtatgggcgcgacaaatattgctgcgaggcaggccgcaaccgttctgatagtagccatgcaggcaaatataagggatcgagcggcactcttcgaatcgctcccaggtttgacggagcagcagaaggatttggcgacctacatgatcaagcaagatctgccggatctgcgcgaagaagcagttcaagtaactcccaaagtagaagatgggctgtccaaagccttgcgaaggttgagcgcaatgaggctgtgattgcacctggaatgatccagtcccatcgacgaattcatagcgcagtaatgacatcgtgtggtggtcctgaatgcttgacctgctttacattgcgaaagtacaacaactcgccgtcctcaacatcataaaatcatgacagatgagctagactctcggcctgtctgcgcctacccgccatcctttccgcgtccgcgcccgtcaatcgagtcggttccggagtccaacgagccagcttgtccagcataattttgagatgcctgggccgtacttgcgtatgtgttgtccggacgctcgggtcgctgacatataggtggactgaatcgctaagaatgaggttgattgactgcggacgcgtatgatcaggtaaggtttgactgtgatgccatgtgcgctgacttacccctttgatctcgccaaagacttctccgagtcctacagctgtttcatcgagccctagactgcccatctcgcgctccacgaattcgacatcgtctagcaggtttttgaaagcttgctcgtttgcctttggtatgtcttgcgtaacaaggagattctaggcagtggacgtctgactaagcttttgagaccgacagccgtggaagggccatgcacatactagtagaccgtcacgaacgtgttcgagagcgccgcgataagctctgctccgcacgtcctctctgagcccgatcaatacagagtccacgtaggccgtcagaaatgtgatcatttcgaaaaggtaggtgcttggttcccgtttcgtattcgcatcgaaatacttgaatcggaccatcgtggattgccttttcaaggcttggttgcctaaaatggattgaggacgagctcccggtcctggcgaagcgggccggctgttcgcgtgattaccgccgaaacccatcgctcctgcaaaggcgccgctcataaacccgcctgaagatgcggtcgtggacggctgatttgtagcggatgaaacggccgctgcctgctgtctggccttcatgatggcgtcgcttaatttaggcgtccagtcgaattcttcccagcccatttcaaagaattggtcgagtttgtctgcgatgatcttgtcaattctcgattgcgcaaactcgagggtggactgaagcgaggctccggattgcagcgtaattaaagtctgagagtgagtgtgcgaatgtgaagatgggttaccggatcttatgtcaaagggattagcatcaggcttctgtctcgattgtggcggtcacgagtgtaactgacttgagatcgacaaggacgctctccagctcatccacagcgacaacgaagtgctccacgttgataacgacttgcgcgacttgactgagattcttcatcgtgttgaccttgtcgcatatgttcttggagacatgagagataagcaagccgtcaagagactttcggaaggcttaatggttcagcttaagcaatcggatctgcggactgccggaactcacccgacgcaggacttcgtcgattcccgctcgcctatgtggaacaccctcgacaaactgataaaactgatccacaaaatttcgtatgttgatgcagcacatgggaaaggtttgggaaaatggcagagcctgagggaatccctgactgttgtgcgatcaaactgctcagcctggtcgcaggtgaacccttaagttgcgattgcttacatggcaatctgttctgcttcgcctgtggcgagccagcaagccgagacgacctggtcgaactcttcttgattctggaccatcatcggttggttgtcgtcttccatgacgatctgcggtgacccgacaaaatcagctcctctgcttgcatacgatcagcgattgaccaggcgaggactgacctgatcaaattcagcactgaattttcgctgtaagaggttcgaatacctttcgaacagcgtcatgagcagtcgacttaaagcgccaacgtcgaagccgtatccctgatcaagatggcatgattatgttttcgaaattcatcacggacattatcggtgctcctcacctgtagtgtctgttcaaatgccaaaactactggtttgactgccaagaaggtgtccaggtcctcacatgccttgagtccttcgctcacgatacgagcgatcctctcacacatctcgtcccatagcagatcaacttcttgtgacgtccggaagtcctgacagatgcgaaggacctgtttttcgatgatgaaaaagccgacgaggtcttcaagtaaaggttgaagggcagtcttgatgctaccagcgttgattgtcgaccgttgcgaaaagatcaaattggcttgttgcttataatgacagacaagctcatgagtaaccgtgaccgagatcttggctgtatttagcttacttttcgatcttcctgataattgcgctgcaattctggccgacattccaacgcgttgtatatgtgaatgcactgcaacaagggtctcagatccacttgaacttggtcattatgcaggggatcaactataagaaaaacgtgacgcatgagactcgtttgatcggatgtaccgggtcatccctgatctcacactctgtcttgtcattgctagccaattcgatagggtcgccgactcgaatgtttcgaagtccgggatctcgatcttgctttgatttccatttgcgcattctgacttccatctggttgagtgcaagtcgtcccacttgtgccgagacctcccgcatgtcgagcaaccagttcttctcggatgcagtgactgcagacttgatctcggcatgaagcgaggggagggatgacatgatatgctggaagaatggggtttcagaaatggccgagggtggtaaggcttgaagatcttctagtgcctggtctcgcccgagccttggtgtatcagcttgataagagcaggatcacgacaattgatcactacgtaccctcagagcagcaaaatgctttccctcattgatcatatcccgtacacgattgaccaggtctagaactcttaaacatgtttgcattgtgtcgatggcctcatcaatgttctgggcgatctttcgctgtttaagaagagcccttttctgcagacaccgacgcttgctgtgtcaggtccaccaggcaatttcgcgacgaatagtatgcttaccttgtcggttagggctcttcctacatctcccatctgtccatcaagctctccaatgcgacgccgcagatgagcggtaccttgacgaacagacagcagcgtgctgacggaagaaacaaagtcctggtaaagcttccttgatcagattgacaattcaaatgaggatttctttcggctcccatcgtacttcatagttgtctccgcatatctcttcaatctgtttctccttctcctcgacgaaacggtcaagactccgcagatagacctgttcagtgcctgtatcctgaagcgagacgaccaaaggtgcaagcgcctcaagattctcctgtccaccgatcacgggtatagcgagctacacaacgacatcagcacacatcgaatctcgcacctgcaggttgaatgacacgaacctgcgatagatgtgcctcgatttcggtattcgtgtatgtcgggcgtcgcttcgacatggctagcggatcattggctgtatgtcgggctataaccggtcctgtggagtcgacgagtggcttcctgctatttgcgacctattgaatctgattcggtcgctcaagagacgtcgatcatgtatatacaaagcttgggcggcgacacgaaatctagatagaccgagggaggggttattgtccatcacattcgtctcgcttcgtagatggccgactcgagctcgcgtactcgtcatgctgaatgccgtaacaagttccggagcatattcatctatgcgatgactacagagactgggcttattctaagccgttacaagtacatgtgcgcagcttctagggattccaccatcttataaactttcgtcgacctgtctttcttctctttgatatggacgtaggcgggcgtaaaggaagtgaattatgcaacgcgaatggacacaattctatttgttctgtgtggggtatgtgagcagagtcgctctttttgtttttttgggtcggtgaggcgtagtgtagtcttagccgtcggctcgccagacagcagacactttgttgtcgtatactgggccaggtgcatgttgctggtagccaacgttggaagcataggtgtatgctggctgccgatgcggatctaccatttgcacaggctgatatccttggtaagatggagcatatccaggctcgacgtggcggtattcgacgaagtgccctccaggagcgatcggcgtgattggcatcgggccagatagagagtgttgctgaatcgagttcgagctcgagctggaagtcagggtcccggctgaactcatcgtttcggctggagaaatgttcatgctcgacatggacgtggtgaaaggtcgcatcggcgcgtggacgctctcaatcgattgtcgcctatccggggtatgtgaaggtgttccactagcaggggtctcggtgccagacaaggcatcatcgggctgctgcatcggggtcaacccgaatgcagatgcggcgagactggtcggccggttgccccgacggctcgagacactcgaggtagaggattgcgtgcggtgcagcgtgcccggtcgacggggactagggctgacgcccgcaaccctggtcgactgcgacctttgtaaaccagatgtcatggtcttgggagcacgtccagaagctgggtccatcgcgccggcctgtgaaaagtcaaagggcccgtttcgctgaggcgaagaccgtgaccgctgccgactgtgcaacgcagatgaaacgttgctaatatccgagattgagccgtgtaaaccagcagaatcagggtcttgccagccgacaggatgtgatcgatcgccataaatgttgccgttcactggatatccgacgtggctggaatccatagacgccaacgtcgtcgaagattgcgatctcgacagctggccgttcaagggagagttgtaccctgaggcatgggaatatccgttgccaggctgcaagaacatgccatgctgggggaacgtggggaagcccggcgtcatggcactactaggggtagcggaaccactgtacgacattgggctgccttcgtgagaggaaccttgctgaagagcataggggcgtttcctccgctccttgaatttgtccagccacttggcagacgccttgaaacgatcctccccgaatcccatcatgcgtgcaatctccttggcgtgctccctcgccgtcgagtccttgacttctcgtccgcaagcttcttgtccatcccaccatttcagcatttcgtgctctatagctgggaatctgcctccgctttgcttcgcgggcttggggatgggcacaacaggaggctgggggggtccagtccatcgatgagcttgaatcaggattttgctgattgtgcttcgatcaacactgtacgcgtgcttcagcgcatcagctgctggcactgcctgaggcggcgatgtaatgcaacttacccatactgctgagcgatatcttcctgccgcaagttggtgttgctgtgcgagatttcgacgatcctcctcttgtcgtcgtatgtcaatttgaccttgggccgtgccatcttggtatcagtacttcgtgcaaagacgacacctgggggtcccgcctggcctggctggacatgggtcccgcttggttgcatgtcgaccgatgtcatcccgggcggccctgcttgaggtccaggctgaatgacatagtgatattgagctcctggaggtccctgcatggtattgtaagccatttgaggttgcgggtattgccatgcctgatccagaggttgtccagggtgatatgcgcgaggagccatcgcattcggatcggcggggtgttggtagacttgtccgtcagggtgcgtctggtatgctaccgggtatgtatactgccctggagtgccctggggaacaggagcctggaaagtctcgatgtgaatgttcgctggcggcgggcggaattggaacggctggtaagtcatcgcaggcggaagatcctggccgacctgactctgagctgaacctggtcctccctcaggataagagcctcccggatgtcgcacttgagacggcgtgtatgaagcataactgtatccggtaaccccgccaccatagggcgtggacatggccgacttggattcttccatggtgcgtctggcatctccttcagggatgggttgtaccggggtagacaaggaggctgcattctgccaatcccccttcgatgggctttcgggttgacaatactgatcgtcggtcgtcgtgccgggatatgtgccacctgatccaggtacgaaaggggacagcaacgtgctcttgtgattgagctgtgcgcctagtttcatccccgttcctacactttccggcagctctgtcggactgatggaaccttctgggttcggattgtccgacaggaccggcgtcttgtcggtatccacctgaacttcgagtccacccgaccgcctgataccgttaggacgcgaagtcgttgtggattccagagtcgctccttcggtcttgaagctctgatcagcggggtaacccacgtaggcgtgcgaccgctgtcctcctacgtgctcctgcttcatcccgtagtcagcggattgattgaccccgtgtgaggcattggaaccatagataccccctgcatcgcggtttgaaggatgaggaggtagataggccgccatctcgtttcacaccaagaggctactccttgcccctctagtattcgtgtgaccgtgagattgatcgaacagaaattgttgaatggaaccgatggtggaaggtgttgatagtgatactgaaaggattaggatcgttgggtcgagcgcgaaaacgacgggatgtcttgcgcctagttgccggaaccctccgagagatacgccgaaccggtttaattgtccagcagactgcccgagcgtagccgccgtgtaatttgacacggtcttggtttcctgtctgttcgatcgagacaagaataagatgtacgtggtcagcctgtgttttttgtcgataaagcgaatctaggtagtgtgatcgaacaaccgctgcgaccgggaccaacggcggtgtaaaggaagtaaatcccgaagccacgcgagaagtagatatgacccggtcgcgcgcgacatatcacttttgaaagagcgaacgaagactcacactaaccggaacgtccgtcggcctcttcactgtcgagcgagctagatcgagtggatagtgggtgaagggtatgtagctattcgcaaggggtttgccgacgtctcgaagtcagaggagctgcttgcagatgaggtgtagaccacgactgactcgccttgaaacggaatcgtcaacaccggccctgggagggttccggttgtcgttcgcgcggatatcgagccgaggaaaattgagagccgcagtcgtatggtccggtttcgttatatgaatctatgcagacgaacattagggtagcgtgaatgctcatgagtatggtctcctgtagctctggatcgagcaactgtgaggatgaactcgaccaacaacaggcagctcaccgtctatcgttcagcgtcaggccgattctcaggtccgcgagcgtaatcgaacgcttggttgcaagagctcgctctcgtcttatccgacttccaaacgagagtgatatgatgagaagcagcgatttcaattcgtccgattaccagtgagaagacatgaccatgacgacaatctgtacgacggtcgtcgtcactacgcaaagacgatccatcccgctgtcgttgggacgggtcttttgagctgctagctgctagcaaagctgagagcagcagcagcagcagcagcagcgcggccgggcgcagagagggactacgctccgagcgaggacaagcgtgacgcccaatttcccgtcttttgctctcgtaaatccaccttggaccccctcgatcactggaatttcacgtgatgccacgctttgaacgcgcaacgagtccctggcaaactcctgcgccatccactgggggttggtaccccagtttttctcgtaatatcccatgcatgggtcggctgagacatcagattgcatgaacgaacgccatagatagacgcgaaacggagacaccccgcgacaattacccgaaagcacacacggacccacgctggaccatatcgtggaggctcgatctcgaaaaaccagcgatagataagatcaaccgtacaggtggcaatacgcgagatacaacgtcgatgatggtcatttgctgacagacatgtaactcaccatccctcggcccctttctctcgattctcgaaggcttcccggcaaagtttctgagatctccctggaaagatctcgggatgccgacagacgccgaaccgaacggacccttccttcatcttcccccgctcgatctcgacgcgccgacgattggatcgcgtcctgaccgaggggagtcagcatctcagccttcggcaactagctcgcgattcaatcgatacgataggcacaaggttacagaatatgatgatgcgtccccgtaattaaagtaaagtgcaaatgcaatgattaaagccttcgtgtggatcgatgttacaacgttctagtcgccgatcgatgcgaataaaatacagctagcactatcccagtggaaaagtctatcccaaatattacgtgctcgacgccccctcggtctcgttatgccgccgctcgatagagtccgccgaaaattcagcgttctcgcccgaaagctcggccggggagccatcggctcctatctcggccccctgtgtgtgattcgatatttctcggccggccctctcctgggtcccattttctagcatccaggcaggagcgaatcctttttccatctccgggtccgctaggtaaggattcgggtgagtattgtaggtcgatccgagggaagtatatctggcatatcgggacaggacgaggaagatatggattagccttccttatcgtagcgccaatctggctccaagtccaggtacacaggtcccattcacccttcatcgtagagcccacagtaagggacgcttagctcgcgcaaaaagatccagaccgtatgatagtcccagtcgaggatcgggtgaactcgcatgaactctggccagtcattatccgtcggatcacgcgcagagagattggctacgagacatgagattacccgagaggcatcgtgatatcagaattgactccttgtcctggcaagacttggtttacttacctccgtgaggatctgtccttctggtcccaacgagaatggcctttgtcttgcttccgacttcgctggcgagaaagtctgcaagtgcctctttcattccaccttcttttggtacgaggtccaagttgtagtaggccgctgaatcccatacgaattgctcgagctcagggaagggcgagtcgggtgcgatgtagattccaggaataggaggatagaggtagccgtcctggggcggagcagcttgatgtcttcggtagaggcaagccgcgatgagatgcaggaggatgatgcctgatgtatgaccgcaaaccaacgatcaggaacaggtacttcagatctcgtaacacgtccactcacagtcctttcctccattgtacgagagtgcgatgtgctcctcactatcacaatcgaaatgctcagctgatatcgctcaccgccttcgcctgccgggactaacccataatcgttcatgcaatcatcgatgatggtcaatgcggtccggagatgctcggccaattcatcatctccttccgcccgctccatcaccatttccaaggcagcaggctccaggctggggtacgactgatcgtcgccttcttgctcctgcccctcaatgtattgctgctcctgggcctctccataatgctgctcaggctgctcttggccgttctgttggttttggagatcccacacttcagttcatatccaacgtctcgatactgcggacaactcacgtcggtcccatcgatggcagacccctgcgccgtctcatacttttgtatatgcgctgcttcttcggagttcgtcctacttggcttctcggggtccgtagtgaatgccgtcatctcggtatccggcgtcatgccagtatctggtccaaacccatgagaacgcatcgaagtcatgttggtggactggaatgatcctccgaaagagctctgcgctgtgctattgtgctcggtcaactgttgctgcatcggcataagccaaggatgtcgtaacagctcagaggctgttggtcttcgtgcagcctcgagtgtgagacaaagctcaataaagtcgattccgatttcggaaagctgacccggctcgggtagcggtggatgtttcgtagagaccccaatgtggaacatgatggccctgtatgatggtagactccagactggtcggttttgttccgttctagtctgtgcagactccgactcaccactcgttgtcgaggttgctccaaggtttgtgacctgtcgcaaactcgagaatgacacatcccatactccatatgtccatcgctccgagccttccgctcttctcgttcttgattacttccggtgccatgtacatcggtgttccggcgagaccgctcatggctgcaccatcccctgcggccattcgtcgagtcttggccatggtcttgttccccttgacgatgaccttggcagcgccaaagtcgacgaatttgatgaccgagttagccccgagcagaatgtctgcaaggcaatcgtcggtcagcaatttggcatcgatacgggcacgatcgctactcactgtccggtttgacatcccgatgttctacgcccttggagtgtagatactcgagaccgtgcagcatttgtagagtatagaccatgatgacatcctcgtcttcaattcggccatgatcgagcaaatcagccaaacttccaccttcgcagtattcctcgaagatgtaaactcggtcccgatgcacttcgataccataataatccacaatgttgggatgtgacagcatctgcatgacgtcggactcgtccttgatttgtttatagagggcgggactgttgctgagatcttgcaccttgatctccttgacggccatgataccgcccgaatcgaggttgaatccgatgtagacgtttccgttggcgcctcctccgataaatgatccctgttgccacttgagagcgatattggatgccgatgacgcaaggaacagcagtgaccgatcttcggagacttcctcgtcaaggacctgtccgaccaagtgctggtcgttgatacgaccgattctggcttcttcgagggctttgaggaattccatccgctggtctcgaaccagtcgaatgctgcgatcgatagcggcagacccgtaaacctcttctgtgagctggctaatgcgctcgctggggttggctcgggttggtgaactggattgtgcagagacgccgtattcgtcgtcaatgttctcctgcatcctttgcaatcgtcgaagggcttcgattcgctcggcttctcgctttgcttccataccacttcgggcaccgagaatatcaaagtgtccaataaggaactgcatacaggtaccgaccttggctcgcaacagtgcaaactcgttctgatccaggtgcaacacgttcgtgccggtcgtcatagccattgcatattcgagcgcgttgacggtccatcggaaagtcttgcggtcagagggatcacagccatcgcagatgaatgtcacccaattgacggcgagacgcatcaatctccggctgaagcgagaccaagcgtcgacttccatgttcatgccaagttttctgccgtgctcggtcgcaaacgcgaaccaattttgtagcaattcttgtgccatcggcgacctgaatcctttcagtgctgattgcacgtgcgatactgagtcgacgatggtctcggtcaggctatgatccgaccgggcgatcttgcgcaactcgcgctgaagccgaggggaatgagcctgttgcggtacgagacaatcgagttgcacaaacgtctcgccagtagggacgtccaagaaggcatcgaggaatgtctccttggcggcattcagtcttcccagggggccatcggcaacaagacggatgcggttgtcttggatctggaaatcgacatagggtagatctagctgcagtacggtgccgggccaaacgaatcgttggcgaggcgaaaccatcaagaggtagacagccggtggttctggcgtctcgacgggaatattgctggccggctgctttgccgatccttcttgatcgccttcgttaccccggccatcgaggtcttcttcagctatttcgttgatcgatggcttgggttgcgggaggggaacacgttcgggaatcttgccgtttgatagcaagagctcctcggccgaatagttgatcatgcccttgggttccgactttttagggttaccatccttgtccttgccttcggcgtcttcggatttgcgctggaacgcgcggtatagcagctctctaatcttctcgggttgatcccgaagcgtcgggctggcgatgatgtaggtcccgtgcgtctcgaaagagccggtgtagacgaaaaagtggtcagtatcatccagagcctcgagaacgagttcaaggtcgacattgcagagatcatattcagccgaattgttgaaccgctcggtcagtttcctgaatcgattcggcgatcagctttggtcgaccgaccgcatgcgtactcgaccgctctcacctggcaaacgtctgcagttttcgatacctcatcttgacggcatccagaatcttggagaaccacggcaagatttcccgatgacgcatgacccggggtccctgactctgatccaatccgtgagcgtcgtcctcgagcttttgcgtattggtcttggccgctggttcctcttcctcggtgatgatgggtaccttgacctgggtctcaaagtagtgaatcactcggaccatcaacttgttcgtcaacgagctatcgacgggtcgagcttggtcagatcgggcagatcgcaggaaccgcgtgaacgatcaccggctgcactcaccaaaagagctctgccacgagcacgtcacctcctgcaacgtcgtcggcgatcttgtagaggaaatcccattcgtgatccagcacctcggtctctctgaaatagatcgccttgccgccgctcctcaacttccactgcaagattctgaaaaacgtcctgagcgattccaagagcacgtcgtcgaaatcctccccgatacagtgtggaatctgccaagccttttcggggtccgactcgaacgtcctcgtgtactcgtacttgacgcgacacgcggcacccagggtcattctcatgttgtgcaacatgtcgttgatgacgatgagcgacgggtcgacgagcttggccgctgcgttgagtcgtacgcggagcgcagcgacgacgagtcgacagggaaacgagatgaggaggatgacttgtgggttgaaagtcgagtgggaaatgtcgaccagtccgacctcgttgagcatggcgtgatgggcgatcacggagagtttgatattcttgacgatcgagtagaggtctgtcaacgtctttttctcaaagagtttctcgatcgaaacctctttgagcgtacgctcgataaacgtcgagtcgtcggccgcgtcgatcctcgccttggcgtctccagggtaatgccgcccgccatggttgacgagcggtttctcgtgattcgtattgggtttggtcacgtcgagttcttcgcttcccgtccactgtctcaacctgcccacgatggcctgaacgagcctgacgtttgtcgcccaggaagacatggcgtccaccctcgcctggaacgtctcggccttgtacaatggtttctccaacatcatggccatcctgtttgggtagagcgactccgcgaggctgagtttgttgagaatgttgagcacctggagcatggcgtgttgatcggccgtcatggcgacctcggcggcttgaatctcggactggatcagcgctggatcgttgacgccggctttggcggccgtctcgacttcttgcgcgagagcggcgccttccctctgtagtgcctcgtccgggatggagattttgaaccgatcgatctcttcgaggatggcgtcgaccatccgatcctttctctccttgacccgtcgcttctcctccatgtcgctccttccacgcagcttggcccggatttcccaccaaaacgccgtgcccaattccttcttgtacgtctcgctcgtcgacctctctcctccgatcctcgatttctctcccttcaagatctcaccctcgagtaccgagacgagcatggtctgccattcgagacgttccctcccttcgtccgaattgggcgtggcgagcatggggacgacctcgtccgagatctgccgtttgacgtgtgacatgactttcgagctatagtcgagtaccgggtcggccggggaagccacgcccagggcgttgtcgcccgatgcgacgcctccgccgatattcatccccgcggtcgaattgactagctcgctgatggtcgctggcgtcttgcccgtcgtaccattggcattccctcccgcagggaccgatccatcggtggtggtcccactcccgatcgtctcgtacgtatgccccggagcgggatccgtagcttcctggatcgaagctcgcctcctcccgctccctctccttccgagtacggcctgcccctggtggttccctcccatgatcaccgtatcctcgtcatcggaatcgctcccatcgtccatccgcatcgtatcgatcttgaagaaattggcatcgggatccggaccgtcgtactcgtcgtactctttgtcggtattgtacaacccacctcctcgcattccagggttggcgccgtacatccagggtcgaccggatagcgctttgggaccatgatggggtttgaccgaggtgctgggttttcgatgccgagaccccgatgccgatgccgatgccgatgctgatgctgatgctaatgctaatgctgatcccgaggcagtagggaggaggtctaggctggatgaacgggaattccgggtactcctcgcctgacccgtctggctcgtcgatctcaaccgtccacccgctccgaaatcgtcatctatcgaatacgcggggagcaaccaaacggttgaagatcgatcagcttgggctcctccgtaagcccgggactggactgacaccgacactgaccttcctcttcctcctcgtccaactcgtcgagatcgtccctctctgtatgactgtacaatggcatcctcctcgtcgcgctccctgaagaggaagccgggggtggaggtaagctgcctgccggggaagatcgtcctccggcgccaccgctggggacctggaaagacgttcgccgtgtagacatgtcgagcagaggtaaggtgagaggtgagtaggggttagttggtccggttgatggggttccgctagggtgggtaatgggtgtcaaagatgacgtcgtcgaggatagcgaggtgtgggtggatggagacccgttgatcgtcccgtctcgtcttagtcagtcatcaagaccgtctttcaggaagtagccgatattctctgttgtatctagctcgaggtcccctgaagctgccgtacgaatttctgtatagcaggggtcggtagggttcgacctggtcgtctctgtcgttctggacggaatgacccggctagctagattttctgaccgattccgacgagacgtggatgaggagcgtgaatcgccggtgagatgatgaggcgaggctgattatatgtccagacgggcagctagcgaatgaacagtgagatgaccctgtattcacactgcttgatggagagacatgggtctcagttggtgcgtggctgatagctattctggtggccgatattccctacctacaattgtaactaggtcgattctagctaccactcgcttgattcccaacgcggccagagttacccaaggggaaggagggagagggcgagggagaaggcacgcgcgcgcgagtggaggagggcgaggcagaggcaggggagaagggagaagggagatgacgttgatgacggcatttacatcaaagtggtaacgttatggcattagctagctagctgagtgttggtgtcaggttgactgatcacatattcacattcggttaaacggcacaatcgggcatcatcgttcaggtgcaggttgctaacaactacactatggtaaacgatgctgcccactgctgcctggctcgaccgatatcgtcatccgcctacgaccgcagccttaccaatctgactgtcacaaatggacctgatactccggcgctcatcccttgattaatctcacggtccagccggaaccttcaacttctcgcgatcatcacgcactcatcatgcaatccatcaaacgggtcgccctctccagccccgaaacgtcatacccggatggaaagagccgttatgtcgtctcccagatgttcacccaattcggtgggcattccggggaagtcaagttgtacgagtatgagagcgaggtacgtcccggaccagctcctcggtctgacaagctcagcgggggtatcggggtcgacgttgcaccgggactgacacaaaggtccgggttctcggtcagctcagtcagctagctcgaggttggtcgctcatgctaccgaccttcctggtctgagggtgagtctcggtatatgtcgatgaaacgcctcgtccggacgtccaacctgacacctgttccctcgaccccacccggacctctattcagaccatcgcctggtccaaccacccttcatacgaatgcctgctcgcttgcggtacgacccagggcaagatccacatcgtcgacctcaattccaacagcctccagagttaccaccccagtaatgtcaactcgaacgggtccacgcggaggtcgtcggcatctagcacgcatatgctcgggacgctgaatttggcacagaatcgagcgtgcatggccgtcgcttggttgaacgtcgacccggggatcatcatcggggcgtacgacaaggcgaaacaacagcattcgttgtgtatctgggacctcgaggtttcgttacaagggttcgagcatcctcccgctctgaaccctagtcgggcgggtgcggggaatggtggcagggtaggtcagggggagaaactcgtccctcatcacgcttgggaggagagacccaccgacccgcaagcaggtacgacgactgccaattcggaaggatcgaggaagagaccgctgcagcagtacctcgctggagagtgcgtcaattcgatcgcgacgtttcatcataccaacacgctcgtgctcgccggaacgagttccaagatgatcaaatgcgtcgaccttcgagctccggggcagatggaagcttcgggtgggtcgacagcgacgacaccagccgacggtaatctagctttctcgttacctacccgatcgatcttcaacctctgcacgtcggcattgtatccccacctgttcgcctcgtgtgaagatggtctctctggtaccgtcaagctatgggatacccggttcctcaggtccagtacgaaccatcctggattgaagaccaacgtcgggtacacgaacccggcaggaaccctggcggaagaggtctgttcgtacgaggccgccggacgaggcggggtcgtcgccctgaggtgggatcaacgggaatcgggccagggtggacagaggttagggataggtaccaaggagggaggggtgatcatgtatgacgtcttgagcggggagacggtcgattcgcgacaagaaccggccgagtttggaaggtcagaggggtcgaccaagggttcgcaatggacgacgttggccggggtcaagaacagtcagtggacgacgttggacattcggtcgttattgaggctgatgtctaatgattcctgatctcgaacgacgtcgtagcccaaacgacaccagaggcgattttgcagacctttgcgttcctgccacctagagattcggggaggtcgagcgtgttgagcatttttcgggataacaagagcacgatggaggagacgggattgtcaccgctcgtgagtgcatgcccgagcgtcgacccctgtgctgcgatatcctgactgagatagaacgcgagacgatcaggtggcttcggggcgcatgggagacgcttcagcgacgctcaattcctacatgaccatgatcacaccgacggaacaggtcccactcttaccggccgcgatcacgcctcccttgccaggtaccaactcggccttgaactcgaactcgacctcgactctcccccgaggtcggatccgatcccaacgggggtcacaacggacgacgctcaacgtccgcaacctgagtttgaaccgtaatgccatggcagaagggattccacccgaccagaccattgtcgagcagaaccgttcgaggccaaacggtcaaggtgggccggtgacctggcagagaaccccagatgggggtagtaccatggccggatcttcacttcaagcggctcaggcgtacctcaacaacaggaccgacgcgatctcgcccgggccaactcctgccccagaggattctctagatttcgactggagcgatctcttaggtatggacatcagcgaagccatgcggcgcaaggcgatgctcgatttcggtttggaggtgagcttcactcgatatcataggagcggctacgagaggagcaatcgtgctgagtgcatgctggcgatagctttcttccaacgatgcaatcgaaagcaaaattccgacaacgagcgggttcctcttcgaatggctcgatcgtgagcaaacaaccagagccaaatatgtaatgcttcacgctgacgctccttgcccacggatcacaggcttcatccgcctcatgggtcttcctgaaatgcgttcggtcgaaggatatgactttactctgcagggagtatacggcgtctggaacgggcgtccggcgacctcgggacgcggagcggagtcgtctacggccgcgacccagcgagaagtcggttccgacggtttcctctactctaaagcggtcgccacgagatcgacggcatcacgaggcagtcggacaccggatgattctctagattcgggctatatcaaggccatggacacgatcatcagacagcgtcccgacgagtttctcgatgcgaaattccctcaggaaacgtcgaaacgtttgcaccggagattcatgttggcgatatgtggcgaattgtcaggaatacgcctcgaagccgagatacagaggtatgccccagtcttgatcggtttgcgtttcatggggactaatgctggttctcatctacaggatttcgcagacacacctcaccaaggccgcatggaccgcgctcgttaatgagcagccagaccgtgctatccgcatgctcaagcagagcgatagtcagtcatctcgcccggcgccgcagggtttcggcctagaagttgacgattgcttcattgccgtggtgcaggcgatacacatcgaatgttgagctccttcttgcaacaaggtcgaatagaccagattgttgccaaagagctccgcttatccgatccatattcccgtgccatggtcaactacctcgccggcggttcttcgtgggaactcaccattaatgaccgtgacctccccttgttggatcggactgtattggcgatccgatttgtcagcgacgcagcggtatgtgctgattgacaagtcacgacgtttccatcaccctgaccttaccattccctgcagctatcggcattcctggaaaaccagactaaaatcgcgcaacaacatggctcactgcaagggataccgttgacgggtcttggcgaggcagggctcgaggtagtgtcccgctatgtagatataaccggtgacatacaggtcgccgccatcttgggatccacgacacgacgaccatcgattcaagtgaaccggtggatcgaggactaccgcgatatgctcgacgcgtggaaactgtatcgcgctcgagtcatgttcgacatgagccgcggtaacatcgctcggtggtatggagacgaggtcaagactccgaagcaggtcattgtgaggtgcaacttttgccagaagaacatcactggtggtgggacgcgagagcaggtcgtacaaagcaagaccagggtgagcaggctcggaccgtagctttcatccaccccccattcctcctcactgacatggttcctgtagactatgggctgtccgacatgtcataaccggttaccgcggtgtatcatatgcctgctacagatcgacatggtaccgccagacggacccgcgcatcgtaagcctgtcattctagctagtgagaacggctcgttgaaaactcgaccgattttgcgcagaaaccctagaatccgcctttgtcttttgccaaacgtgggttcttcgagcactgcatggccatatagcagtctaggcttacccaagttcttaacagctgtcaccatggcggacattaccagcatatcatggagtggttctacggtacggaagatgaggcaggacccagtcgtcacgatacatgtgcggtttcgggttgcgactgtcactgtgcagctctgcgatgaattcgacgggtgggggagtatttagcatgaaacaaggcattcgagtcaacaaaagcgtatattgaacagctgtactgctgccgcgtttgctaaagtagatgacacgtcgagaaacgcaatgatatagtccgtatacttaaggccgttccaccatctgccgaaggctcgagacctgctctcagagctggcgaatgacggatctcttgcgacgagtcgttttcatcttgcaactgtccatctcaaagccaaagaagtccttgataagccaaaaccatcatcacggtactccagaggaagctgacttgcactgcgttggaatgaccggatccgatcgaggtgacgatcgggtctttgggatcggctggggcactcgcaccaggtcggctatcgatggggctggatgaagctccaataattccaccagcggtggtggccgaaggggcatcgttaccagcgacagtagagctgttgtcttggaccttactcgcttcgggcgcggcacccatagagccagtgactgctccggtagagctggcctggccagcgcttgtagacacttgagtaggttgagcgacagacccgtcggacggtgtatcgctggtagctccatcattcggcgaggcggatccctcagtggtctcaacaatggccgagcttccgtgcttgacgtcactgggcatcgccacgatgacctctccggacgaagtagtggcggcgggaaggactgatttgccagtctcggcagccgaggtagaaaggctgatggtcgagacggcagcggaggcagagacggtagtggaagcagacccagggagttcaggacagataccacttgcagcagcattttcggccgagaggaagacctgcccggtaaacgagcttcatcagtgacgatcttcggcgttttctccggaacgcgccacgcacgaaaggcttgccaccgctggcgaagctgaccacgatcgatccttccgaggagacttcgaaagcggtgcaagtgagcatgctagtgataccaaaagtcagcgaggcttcgtgccatgtacatcctcatcatcttgcttactcgacagcagatccgttgaagctggtcttggggactgtcaaagagccttcggtacttccagatcctcgctgttacaacaactcttgagccggcaagcgcgcgtttcgagtccgcgccggcataaactcacgttggtaatgacaaagacggctttgcctcgctgcagagcagcctcagttgcagaccctttgggagtgatcggcttggccagctgagtgtcgaagtcgctagaggtagagaggtagcctcgaatttggttgactcgcttgatagtctggtaggccaacttttcggtcgggtaggtcgcgcttcctatccctccgatggtagaccaaagcgcttgacggttatcaggatcgtccctattggtacctatcagctcgtttgcgcttgagtctcgtcggacgtatcgtattcatacattccgtatgccagttcctgtgaggatcaatgagcatcagatcgaagcgcccggctttgggaccctatgggtaactcacctgctcgtccccgtagtacactgccggaagggagtctatcagcttgattcgcgcgcggtaatggtcgtgagcttgtgacctaccggtaggaataccctcgaccattagggcaaagacaaaggcgttctgtccgatcaacaaatcttggttggatgcataccaccgagcgttgtctgtaatatgacagattccgaacaagttccggcttagtcggagtgcaatgcgttgcaatgatacccgacctaccgtggttcccgataaatgttccccaaaccgtagtgtcctagcacgaggtcgatgatcagcatcgagatcctttgtttggctctcgagtaagcgaaactcaccttgacgtagtactgttgctctccgagcttgtcgagcagagactgcacgctaagggtcgtctgggatcccgggatgaaagccttcttgaatccttcgtacaaggggtacgagtgaatcgagtcgatgaatccgtccgtgtaggtcttgccatcgctgtagtgcaagggagcaaaacgatcagtcagataatcaaagggatgtgacagacgcgatcgactacgagcagactcacgtggcagatgaggtgtagacttctcccatgcacatgactcccgcggcctgacaaaacttttgcatagaagaaggctccatatgcttggcagctattcaagttgaatcgtcaggacagatatactagtaatttgacggtcagcccgaaagccatgtactgaccgtctatccttaacccgtcaatggcgtattcggtgacgaatccgttgatccaggaattcaatgtcgactgaaccgaagggctctctgtatcgacgtcgacaagggcgacctctgatgcagccgagagtagcgggtgagcatgaatcatatcacgtcttgttaatctgactcactgtcgtcacccaaagagctagtgcaagtagtacgagagtgctcttagcagtgcaatgctttagtaccacaccataacgctgactcaccacgtcctatactcttcttttttaccccagtccttgatcctgcagtaagggttatgatagctcgcttcatccctgtacatcatgagcggatcctgttccaccatgtccttgacggtggtctttcccttgggaagagtggcgacatggttgatgacgatatctaccatgacgtaaattcccttttcatgggcggcttgaatgagggctttgagatcgttagaggtaccgaaacgagcgttgagtttggtcacgtcattgacccagtagcctacaaggtaaattagttcagcttttgtcgactctttagggctcgctatgatagattgggagacttgccgtgaatggcgctgccatacggagtagagacgtcgatgttttgattgacgggcgaaatccagatcgcagtaaatctgatcgggaagacaatcgactcagactaagcatctggcgggatcgtgatacgacgtcaaatttcgacctaccccatatcacggatatagtctagcttgtcgatgatggacctccaattcccaccacaccaggtcgctcctttcgggtcacaattggctaccaatccgtccgtcaacgcctgctccggggtcggctgggcgaatcgatcggtgacgatctggtacatcgacctgccacgccattgttccttggtagcggcattgaccgaagtggtggtcaaacaggccaagagaccgacgagagctttaaagatcttcatcttgtttctgaggagtcaggtcgtgggaagacgaccagtgaacaggtctatcagcgatggactcagcagggcatgttcatcttttcttcgaaggggactgactttgagttagcgattgagtgatagcaatgagtagacaaagggtatcgagagttttcgtgactgggggatgactcctgaaagtgaggcaggaggttttgaaagcgtataaaaggacgtgaatagatcgtcaatgggtgtacgtgaaagatcggttcgcaggtgatagtccggctaagttgaaagagtgtgtatgtgtattgatactgtggtacggtctcgttgagagtgcttgtcgtgaagatcgagatgatgatgctggcaaaaggaggtggcgatgcaatgaaaggtggaaggcagtttgtgatgatggatggggtcatcttgatgtttgatgttgtttgtatatatatatgtataccccgtgtatcccctgtatcccctgtggcctgtggttccctccctttcgtcccttccatccgtcacatgtcaacaaattcggctatgatcaaacatcaattgatcgacgacgacgacaaccatcaacaaaacaacaacttagcgctctaaagcccttcccctctcctcttcccgcttcgtctaggccgtgtctcatcatttttgttcgtttcgatgatgacgaccggtcgcacgcaaaggagggcggggtgcacagctcatctagagggcattgtctggcgccacgcggacctttgaggggtcaaggcaagacgtaatccgagtttcagactcggtcgcgcgtcttcttttgttcttgtggtgattggcgatcggtccgagctctattgaccgcccgacatccgcctcgatggtcatcgagccgcatgagacacgccgccttgcgttccgttctgtcacccaatacgctttccacgccgacaaccctcccaaaacgaagtttactcgatgatcaccacaagtctcaactgcatcctatcttgagggcgaacaaaactcgagatccggtcattgttttacgtagcgcttgatcaatggccagaacatctcggtggctcgattttgacccagccagatgcgatcacggctgcgacgcgatcaaagagcgtttcgagcgttgtaacatagggtgtacgggtcgtgaggtagcggatctagtataaggcccgaccagtggatgttgcttaagatcagttatcacgaccctggatttccataaacattagacatgcaatccctttccttgctcaagaaccgatcaagttttcagtttttttttctgtcatcgtgagagtctagtcctcgcttcctggattcgaagcgcgtttgacctgtcgcttcggagaggaacgagatattcgaagggtatcatgccatgaccatacgtcgtgcttcgtgtatctcgtcgcgatgaaaaaatgtacaacaattcatatccgtgctttcttcattcgtccaatgtcgttcattgcatcgctactttgccacgtctaccttgacgttcatcgtccggcctgactttgcttgtaatagtactcagcctgttccctcggtgtcatgccctcgattccggaagcggcgccggcatgggtcgtcccggccaatacggcggggtgttgagggggaggtggcaacccctgcgatcctccgattccagatccggaccctgcactggatccaacggggtaagcctcgcccgatttctccggggccgaagcccgggcggcgaacccttccccatacccgggcaactcgcccgtgtgctggccatgctgttgaccctgatcgagcccagctcctccgaggctgttcaacctgaccacgccttgcccggcatcgggtttctcccttcgctctaattgtcctgtagcgggaccgggaccttgttggctattgtcaacagggatccccgtttcagccacggtaggatgggacgccacggcctcgctgttcaacatgggcaactcagtcgacaaggccgagtcgccgaacgctcctccttgtcgcgactgctgctcagcaccgaagctgggatgagacgcctggacagggtgatcgaacgagctccggtgtttgtgaaccgagggtacgttcaacgcgcccaatccgtgttgaggtggcgaggcggcggtaccctgtccaaaggatccatggggactgtgaggaatcgcagcgggcgcgttgttcaggtgcgaagaagggtaagtgccgataatatcggcgttcaacggcttgttgctctcttcaatgacgtgcgcgggaacatgagcggggcctccagttgagggtcggggagagatcctcccaccgggtcccgaagaggtatgagggacgagcccgccatcatccacgctaaccttccacccgccatccagaccggcgaggcttttcctaacaccttcctcgatcgacctgacccggtctttcttctgccccgtggacagctgtgccccgggcgtcaaggtggacgaagccgagacgttcctgatgggcgaagccgtaccagcccgagcggtcaaatgttgaggtcgagaagcgctggggaaaagatcaatcaaggtcgtccccgcgtgagataggaccatgacgttacgggcgtactgttgagtcgagatggtgacttgaatcagcgactgtgacgaggttcgacgttgcatatccagcgactcacctcggcgtacgcctcccaggcggccttttccgacctgaccaaggcctcttccctcttctcccctaggccgagggataattccctgatctcctctctcaaggcgtccacctcggtgactccggcactgccacccttcttggcgaacctcttttccatctccttcaatcggatctgtcgttcatccacttgctgctcgatctctcggagggctttgagcggggcacgggcatccagaagacgggtggagaggatcttctgggcggacgagagctgggtggtcaggttgagcagggtcaacgtggtaggagctgcatcaaaacccccaggtcagcactcatcgcctgctgtatcgtttaggacgtagaaccgggactcaccatcgtaaaggctttctctgcccccgacaataccggcctcgacgtgcccctgtgcacctgctccgtcccctacgggcaacgaggagacccaaccgtccatctctttgcctagcatggccgtatcccgggagagcgtttcgtaatccaacgcgactccctatcatcaatccgaggtatgaaaggaatgcgggaccaagatgcgtgagcaacggagcacgatcatcctcgctgaaggtaccgccccggactgaccttgtgagcggtgatcccaatctgcagacctttcagagcgggcccagtagatccggtggcataatgatgctgcaacgtcctcaactgatgattcagctgagctatctgtggattctgactgtattcatggattcgcaacgagaggagaagacggtgttgattcagatccgatcgacgtacaagctcacatactgggcaaagctgggttactcacctcaattgacctagctgggcggacaagcctggtttccccgtcccggtcacaggagtcccaccggtagtggtgctggtggtggtcgaagtgttcccgacggccccggattgatgatgcccactgtcgacgtgttgttcagattgtcggttcatcaggcccgaggcttgggccttctcttggaccttgttgaggaggccttgcatttgataagtttgcggtatgacttgtaactgtaatagagtgaaggtggttcgtatgtggcaaggtaagttctaagaagtgagaagattgatattcggcgttgttgctggtgctctcgctttatatacctgagcgcgcagctgattgatggtctggatggtcctttgatgatgatccacctacctaatctcacccgctgctgtgctcggatctcgccgggctacggggtgagtccctcgctctcacgcccgttcgcttccgttcaacgcgaaaccttccataacgtcataccgtgacgtcagcaccaagcgtgaccttggcgccaacaaaaaagggggcgataggggcacgtgattcctttctcatcgtcatgcagcatgtgttcgagtggtaggtctctaatctctgagcttgggctcgagctttacgctgtaggcaggacggtgaccagatactatttgccgtcgcaggagtagcgcgggggtagatcgtttcgttgttcacagcgggacgacgcgagtttcagctccagcctgtgcgccaccgcccaaatgctctttcccatcaaacgaatctcatcaaacgaatctcatcaaaatgaatctcatcaatccttttgtctgatcgtcgtacatcaattgttttttcccagtcgatcatgatcatcaaattcttttgctttgttgttgtttgacaaacgtggacgcgtcaggctcactcggtggcgatgacaactggaactcgggcgagacgacattgaaatacaagggcgtcacttctatactgcagcagctcagcagaacaccttgtcaacagcctcctcaacctgtgggacctcaccatccttgatcgatactctctagatactacctattgccgacgcacaagttcgttcactgcccccaatccgcccaatccaccccagtaaacctcccaaacccttcccctttgccatcctcatccaccggtctcaatatcgttcccgtctcggcctcatactcgtgccagtatttgaccagatctaccagtctctcaggatgacgctcggccaggtcggtcgtctcgcccggatctgaaaccagcgtgtgcattcatcattggtgtcagtcctctcgagcgtgaccacgttcagctaggtgcgcgtgcgcttaggcgtaccggtggacaggtcgtacaacaaccattgaccgttccccgtaggtggaggcaaccatacggctttccaatccccttgccttatcgcagcttgtccaaagactagacgcacagaaaagcaagaccgcaggtccctctcatcagcctcgagaccttccgcagaatccaaccaacgacacgcccgagccgagcaattctcgggcgacgtggaactcacgttcccacccatggatcgcattcacatcgtgcacctcggccgtctccccagataaccaccgtgtccacgtcttgcccctcgggatgaggacgttgcgacccctgaactcggcgcccggatgggacgcgccggctagatccagctgtgtttgaccgaccaggagacgggggagtggagtggggggtgaacttccatgagtttccggtttacgcatcgtatagtctgggcagcatggggggacaggaggggaaatgctagactcaccacagtcggcaagatgtccatgatggtggtaaacgcatgctcgaccccgcccttcttttccacaggaatacacggcgagcggacgatggcgggacatcggatacctccctctgtagaccaagctgcgttcgtcaaagtgaaaatacgtcgatgtggtgtcagtcaccgtggtaatagttcggggacggctggagggcgggatactgacctttatacattcgggagggagcggtcgcggcttgagcccatcgagggcctagataagtgaactatcgagaccaccatccgatcagctctcaacattatttcgtccgactcggcaagtccaagcgagcagagcggagggatgggatgggactcacagagttgccccgtccgatgttctcgagcgagttgtcaaagtgttcccggatggtcgcttggagcgcttctcccatgatcgggatggcctccagcctgcaaatccccgatgtaaagaccttatctcagtaccgcagggttaaagagggacgaggaggaacgaggtggttgcttacagcgatccttcggctccattgtcgctactgaaaaatacaaacgtgttttccaactcgcccgtcacagtaagatggtcgatgatccgtccaatctgggtatccatgacttcgaccatcgctgcatagacctgttttcatacccccaaattgtactcgtcatctctttagtgatcaaatcggggaagaggaacgatgaccgggactcgcctccattttgcgttgactgatctgacgttcgtcttcagagagctcggaccactcttccgtcccgtaagccgagaccatcggatgagggataacctgcgtcccggcacatcgcacaagcagtcatccgttaggccgcagtgggaaagagatgggtcgaacgctcactcacgtcttgggcgatcaacccgaggttcttgagttcctctaggcgggataggcggagagcttcaggtccagcggaatacctgcccttgtacttggcgatgatctcttctggcgcctggaggggccctgagagcgttatcatccgatcagcttcccgcattgctatcgcggtgcgaggctgggtactgacagtgcggagcggtataaggcaagtaagcgaagaaaggcttctcctcgtccttctccttcaaaaaaccgagcatccggtcggtgaaatacgtggtcgagtagaacccctcggcagggatataagggatctctctatggctaatctgatcgggaccctcagtataaagcggggggagcatcttgatcgctggagtcccgtcttccaagaaaggttcgtatagatctagagacacggttgacagcgtatggttagcagcaaacttgatgtaggatcgtcgccgaggtagacgaacaatggttgccggctcctggaagcaagctgaagaccttttcgaaaccgcgagcgtgtggctgggcgtgtttcgggaggcctagatgccatttacctaatcgcacatcgcgttaccaggtttcatatcgttaaacccggtataagattaaataacgcgagcttacctgacatgatcgtctgataccccgcatcttgcaatatctcgggcagagctgcgacgcgctgcacttttccgacggcgtcagatcacaagcaatgatagtcgtacgagggacgagaccaacctcgttgagcattccttcgtagccgaccttgccttggtagagcggatcccgagcaatggtctccgccatctgtcccaaaccggccctgcatcgtcaatcaaagagcatgattaaaacctccactcgaacgaccggcagcgggaaggactcgcaaatgattgtccgttccgctcatcaacatcgaccttcgatcatacgtaaatttagctgtacggtgtagaaggtgactttcgcgatgactcaccgggtgggactgcatgccgaagccgtatggaacccggtctgcctgatgccctcgctagccagcttgtccaggttcggcgtcgatatctgtcacgaaaggcactggggttagcaatcgcacgaaagaaactcggaaggactgagaaaatcgtacttccgaaccgaacactccgatgtcgctgaaacctaggtcatccgctacaatctgtatgcaaagggtcggcggagcgtggtcacctcaaagttagtcgcgcgagcggaatgatccccgcgcgtgacttgcgattagaaagttaggtcttttggtaatttcggtggtcatggtaggagcgatgcaatcaagttggctggccctcggggttggctggaggatcgattccggtacttcgggatgtcccatcacttgaatgtctatatagcccggattagaggacacaccgggccgtttccactcgatgttttgccgtggtctcggggtgaatcgacctcggtcatcggtcacgtccggttcaccaagagaacgtgacgtgacgcgatcgctgagcacgccataatccgggaacgaggcgtttcatatgaattggccgccccgctttgacttcgatcgttcgacccggcgtaatctcttctgtccttactaatgtgcaaacgtgcaaattccatcgccaggtcggcagataatgatacgccaatctgccgaaggtgctggtatcgctatgacccagaccgaagcgcttcggccagctggacgccagagctgacttttcgcacctatcagcacaatatccctagcacgacatttcatcacgacgtaccacgtgtatttcaacaagtcaactttcgtgtcgagagttgcaaggtcctcagataggactgtgatggtctgcgatatgacagcgtttgtcagacttacattctgtcatgtctcatcgggatttcacacctaaaagccttcgacaatatgtccgtccacatatatacatgtaactccaaggccgagtttgaacgtactctgcgatcagtttctccgtccgcttccttgtcatcgtcatcagaagacaatcttaagactagtattgcggattaagtcatgtcgaccgacccgacaacccaacgggccagctcaatctccgtgcccttcgactcacccggggaaaaggacaaccaggataatgactcgctgaaagagtctggcgctattagcctctcctcagatgcttcgagcaatccgaccgagatcgcgtttactgaggcggaagaccgcgccgtcaggcgtaaattagatgtaatcgtcatgccgatcctgtttcttgggttctacgtctttcaggtaaacttctcatgacgattccacttcagcgtttcatgctgactcatcgtctttctcagctggaaagaggaaacatctccaacgccctgaccgacaactttctcaaagatgtaggaatcacccaagatcagttcaacacgggtcaatctctcctctaccttgggatcatcctcctcgagatcccctcgaactactgcttgcaacttctcggaccgagcgtgtggttgacttttcaggtgttcgcgttcgggttggtagcgacgctgcaatcgctacaaaaggggtatgggggatacttggcttcgaggatcgtgctgggcgtggtcgagtgcggttatattcccggtaagcgggtccgtcggttttgcatgcaacatggaactaacccgataacgaactctgccaggatccttgtacgtgatctcgacgttttataagcggaacgagcttgcagcgaggaactccgtcttctttctcggatctggcctggcaggagcgactaccggtctcttggcgtacgggctcttgcctctcggcgacaagtatccttctcttcatggttggcaatggatgatgatcggtaagtcaggtagattgtagctgtcattgaacacggactcaaagacgaactttcgtcgatcagttgaaggatgcatggcgattgtcgttgcaatcctcttcgcctccattcttccggcttcgcctctcaagccatccgccttactattccccaagctcagtctcttcaacgatagagaacgacagattttggttgcccgtgtgaacaacgacgatgccgccaaaaggaattcggccaaaaagctgggcgtcaagaaagacatcttgggcactcttgggaattggcgcgtctggccccatgttctgatagctatctgcttgatcgccccgactggcgcgatgggcacttacactcctaccctgatcaaagggttcaagtttgagagtgagtcgaagtgccagatttgtcacaccgcgaagtacgtgcctgacctgtcgcggtggcagctttacaagcaaacgccctctcgtcagtggcaggatggacatccctcgtcatgacttttggattcggctacttgagcgacaagaccagtatcaggggaccactcgtcatcacggcaatcagcgtcttctggctgttctggatcgcgttccagcagaaatcgctttctccggatcgatggctgaaatatgggctgttgatcatggtccaggggttcaatgcggcgtatcacgtaagtgtgctcctagcctgtccgttgagacgcgccgcactctactgatgcctcaaagcatttcgctagcctttgaatgcaacgtggctttcgttaaactgtacaacaccgcaacaacgatcagtcgctatggccatgtgttagtatctcgttgctgctatcattcaattcctgatacccaactgctgctgatatcccgcccactcgtctcgctcagtcgtgatggcggcgaattcgggagcgctggtgggatcccaactcctgcgtggtgacgactcgcccctttacaggagaggattcaagatctgtgtttgcctagtcagccttggactttgggtttctattcttcagcatcttcaatacaggctttcaaaccgccgaatccaagctcggcacaatagcgcgtcagatgatatcgagcccgatgcgcgtcaaacggaaaagccgaaattgtatacgatttgattttggatgtctttgcttaacaaaacattaatcaagcagaccattgaataatgtatctacgactatcgatacgaagagattagctatatgatggccttggttattttgcaaattgtagatcacgttgtgtgcagcttagaagacttcgcggacatgatgacgttctcatgttcattatgaacaaaagagatcgatcgcggtgaaacggttaccgggatctacctagccatactgaagttggtcgtatgatgtcggcttgtagcactcagatcgatctataatgcatcctatcgttgtgcgagctacatatttcgtcattcccgcctcagcttcaatggtggacatccgacccgacacctcgattagttgattgggtgctaaaaagacggagggtcagatttgcgactgttcgtgccacaggtcagttctcatggtagcggtattagatggcgaattaaagactctaaccatcgccggttcaatatcagtagccacagcatcggcgatcaacggagctatagcatacgctgcccatctcgactcgccgaatataggctgcttgcctgccgtctcaacttggctcgcgatcgggctaggagacgactattttctcagagctttgagacgccccgtacatgatcgagccagataacgaatcgtctccgttacagattcgaacagacattcctcgaccttcgatcggctatcagcttcaggatccgttgttcggtgaacctagtccgacattcgctttgtatatgaaagcacccaggaagctaatactgaagcccacattactgatagaacactgctgaacatggaatttgaaaaggtcgggcggcggcctatcagaagggaagctgggtatcaagctgaaggagacttcaaaatcggcataccttcagagactccaacttgtttgataaatacttacggtcatgaaccgcgccgctctagcagtaacatacatattatgcgacacagtgtcgagtcgaatccttaccgcagattccgcattgagtcatgtggccgcactatcgtctcccggatcgacaatctaaggcggagggtccgatgcattcatgagactcgagccgaatcaacttttccctgggggcctttcagcgcttcactgcctatcgcccaactataataaaacctcgcggtggcagtgagacattagagcgtttgaccgcactttcgataagccggagcgcgatggtactttgttcattgatgttttgcatctatatcatgaaccgcttataccgtagtacccaggctagaccactaagtacgatcaggtacccgctcaagacagccagcgctatcccgtcacccgcgtacatcgtcttcatcgagacgttgatcaggccggtcaagagattggcctagcacgaacatgtctttcagcaatctactgctacggtttggggtccggggcgcggttcgatactcacagcaagaaagagaacgagtccgttcttattgaatgcggccattaatggcggcactacctttcgatgcctcttgttctctgccccaaacactagcagctcgacaaagaggtagccagcgaggaatgtcgtgttgaaagctgctgtccataccacgtaggacgagttggcctgcgaccgaaacatgatcttcagcttgatcatcccgaaagcaggcaccaattccattgtctgactcaccaggcgccttgatacccttccgccgaacaaccaaatgatagctaacgcgctccaccagatgacggcataactcgccaagatcatccctagctcttccttgcgtcttgtcgctttccccctctcaaccccgcgggaatcgtaatctggtacgtcttcttcctcctgtacgtagggcttctccgggaacgcaaaataaggatcagggggaaggatgtagtgcccgatgtcgattccgagcaggtaaatagcgatataacctatatcaaattgcacctcagtattgtttacgaggcgtccagtatcactagccgcagggactaacctggcaggctgacgagaccttctttgttcagcccgatcaaaccggttcggtcaggtcccatcacccaaccctgcaacccgacccatagccatcccaaatgcactgaattggttcatcagctcacccttcagccgggtctgcatgacttgggtcgcacggccaactcacagaacatgacgatcaagcccatatccctgaacctcaaccgatgccttagactacccattatcccaccgacaaggggcatcgaccctagcgtgaagaaaaagttccagtgcacgccgtattcggtcatatgttcctgacgatccgaagtccagaagaaggtggaatcagtcggctattgttcccagcttccagttgtgctgcagccaagagagatacttacagggtattcgacacccttgaccatcaagaccctgaacgcgcccagaatccacaccggaacgctcttcctgaaccctgtcaagatgctcttgaatgcgcccgtccctgtcgactgagggttcgggaataggtacggtgcagccgaggtcagtcctagagagaagacgaatgagcctacaccgatgtccatctatcctggtcgtaccgcgaaaggtaaacgtgaatatgaaattagggtcagctgtcaatcccacaactggcgtgttcgtcgagcagaggtgaggactgaccaagctcgtcccccaatcctcgcacttcccgaactctctagggaacacggggaaatccacagcgaggatggcgatgatggtcatcatcatcatctgtgacctgtataccgagagaaacggctgtggcgggaacctagacggggacgaagagcctttcgctgccgattgggaattgtgggaggctgttgaggttgggtcggatgctagattgtcgcgaaaagtgctcgtggtaggtgaaggggagttgatcttgatcgtgtgcgtatcattttccggtgtcaacgagggagaacgacgacgagacggggttcctaattgcgacgtatgtcgagctgggtggaggaggtcgggtttctccgattgtcctaaaggcttcagatcctcggttgacgtcgatctaggtgcttcttgcgaatccgagtggtcatgaccaagaacgggttcagctatccgagagaggaacttccaaatgatggtgttcaacagaactagagtgaggttgaaagctatcggctgagacgaaaagatggtctgcccgaggaggagtgggaggaccgaggtgataaaatccatcgagggtgatgtccgggcgcaggattgtgcctgtaccgcatagaggtagtacgatgtctacagttgaaatggtatagttgaaatcagctatgtttgattctagaggccaaaattcgagtagatacttgccagtcccgccaggctgacggcgttgacggtccagattgacgttcccgggttattcgcgacgaatgcctccttgaccgatttgtagtccatcaccgcagagagggattctggggtcccgatattcagacaacaccttgttcaatacgatgtacacgaatctagatcatcctggtccacctgggacgaccatcataaggggatggagaatgttgtgatcgattgaagcatcgctgtgcggtgatcaaagtctcggacattgtcaacgagaaagggggggataaggatgatgacgtaatataaatcagcagcacaggccggcctatcatcacggacatcaaaaaccatcttaatcaacatgatcatgtccgctttgtgtgtctgtctcgcctcattcaacccggcggatctcgaggtcatgatcatatcaccatctcaaccaacacaacgaagatgaccatcgttgccgacatataccagcagcacactcatctcgaagtatgaaattgactaccaatctgatcctcgccagtgcgggtgagtccagctcgcctctgtctaagtcggggtctcggctgcactgacaccctcgtggtatgcacctacacagcattggtggccaccatcacctctgcctttcccctcaccactcgctcagcctccctcgacgccctcttcggattctcttccgatccccaagccggatttgacgaaaggacgcacgggaaagtatgggtcaacggggtcggaccgggaagggaatacgcccagggatacggattgggacgggtttccgcggctagggagaaggagagggtggacagggattggatgaagtggatggatggcgaaaggaaggatgcggatggagttatcgcctcatggatggaaatctgggagatgatcgtcggaccctcgactgcgactgaaggagaacacgccgccgtcggtccggctcatcatggacccggctatcaacgtgtcccccttggtggtcaaaggcgacctcatgagcatcccggacctcaccatcaccatggacctcatcctcatacgcacgcgcatgatgacatcccggacgagggattggagtccttgctcgtcgccgctggagttcacccggctgggaatggacacggcaggcatggtcgaccaggtcggggacgccaccaccgactctctcacggacaggagggtcacgagtctccttgtttccttgcacggtaagtctgcttcacactgtctatcgccaattcctccttgaaaggggctgaccatactcactgtgcgcattgcgatatgagcagtttctttgaagcactctcccacttgaaaccacacgaatccttcctgatcacattcaccctcctcctcggcctcttttcgctcttgaaactcgtcatcgtcctcgtcgtcctcgtcaagaggtctcacgcctacgccaacgaagtcgaacgcgccgatcatcacaatcgggatgggtatccgggggaagagtacaggaacaggaggtcgttgagggcggagggggagaggttacctggatacgaagaggtcgcgaaaggggaagaacaggccgagaagcgggagaaggagtaggcggcgcgttgaagtagagtcgcacatggcttcgatgccgctcttccgttgcgtgaaacccaagaaatcgttccttcactttgtatgcccacgttgttttccaatttttcgtttgtaaggcagtttgccagaagttatcgaatatctataccggccgttgcttgtgcatcgcctcattgacgctgtttctgccgtagcctcacgatcgaatcccactgccaaaccttcgaggtgctcgaccgtgtaagattcttgcggaataccatgtcaacgaacgtcagaggtccttgagtgaaggaatctgatggacgagcagcagcaagccaagttggaggtacccttgcatcctctgcgactccatcgatcggtcatcggcggcttgggaaccacagtcgtcacgatgaaaccttgacgggagtttggtagcgcgcccctgtttccgaaactgttccgacccatcgttgatcgtcgacatagggtgatcctctaaagccttcaatacatagcgcttgttcttcaggacttccaaggaaacgaccttaggacatgtggtccgcatgtctggctgaaagactaacacatgggtggcaaatgagactgcaaggaggatttgcagaggtaggcttgcggaaagaagaggtctcttgggtgcaacggcttgtcggttttgctctgcagcctcgaagctgacaagctggctggtgaatatcatgattgttctacctgtgatcgagagaaggagtccttttccgaaggaacacttccaccgggtgaagctgagtggaccccctgccaaatggtggccactgacttatccgcacttagtacgttcaaacacctgatccttgatttatgactggcgcattccgctaaagacaccctcgataagaaattacaacatacttttgccgccctgttctgcctcggccgtcctgctcagaccgtacttccacagaaactcggccgcccgctcgatcatctcggggctgcatcgatgtccacaatcttcctggctccacctctccttgatacctttcggtccgacttgcaagcgttcatagaaaggcactcccaaattggcggggacaacatcgtcagcctgaccggtgaggacgaggatctttttgttccagaatgggttgacctgagggtcggaagaatcgaagggcgagttgatgggatcggtgcgtttcaaaaggtcctgaagggatcgtgggaaagttgcaggagatccgtgggatttcatacggttcgtagtgagtgacgtatagtcgggacagccgatgatagggatccctagcgtgacacgagggtcgtgcgtaagaagctggtacgtgacatggcctggcgagataacgttctatcagatacagccgcagtctgcattgtgatggacaaagaatctcacctccgagacttattccagtcatccaaaattcttcgatggtcttctcgtccttggggaataggtagctcgggatgatgtcgatcaatccagagacgtcgctcgtagtaccgcggaaaagcgagtataggtccagactggagtgggagacagcatcaagtcggatcagtacgatatccaaattctctccacaattcattcttacggatggcgctcatttttagctagatactgattcgcttcgtcgttgacaaaccgctcgccgtgatttcgctgatcgagcgagacgatgacgatctctcttcgtctggtacgtccctcctggtcctgctcttcgtgcttacgcgtaccttcgagaactcctctgacaagatgtttgaggtcgaattgatgacccatgaggccgtgagaggctatgaggaccgcgacagggtgaggtgaggcgagtgcggcttccaggttgtagacaacggtatgaatcccgcccatgttgtatcgcacatgaggcgtcgtcggtttggagggttttcgttcactcatcgggttgcaagcgcctataacagtgtataccgaagaataatgttcgatccacaagatctcagcggtcccgattcccaatcatgagcccgatagctgatggagatgtacgaactggcctacatgctacatgacggtcagtccagctccggctattatcgaggagatgaattgcttccggtgacgaatctacttccggaccaatatacttccggtcacctatttacttccgatcaatgggaatcgatcgtcgtgcttcgacccacaaccataacaaccagcaaccaacaactagcaattgggacgccttgacttttgggcacaaagattattgacgaataggtcataacgaaggacatcattagaggagacgagctatgttcatccgaaggctaacactagcatcactctgcactggttgatcgcctgttgaaccgccctagcagtgctcagacgatgcgacaatggaggccgatgaatggtcgcaacaagatccggacgcgatcaaggcgttcatgcggatcaagcttaatgacatttcggttaccatggctcatccagtctccaccttggatcacgtctatcagcctcctacgccgagcgcggcaacgtccttcccgccggggactctgccgaccaaggtccccgtagtcaggatctttgggacgacgccgaggaaccagagcgtctgcctgaatgtgcatgggatctggccgtatttcttcgtcgagtatcccgctcagcggagtttagctccagaagctgttcatcgatacacacatcgtctggcgaacgccctgaacagtgcactgtgccaatcgttaaggcaagacccatatgcgaccaattcaaagacgggagctgggggaatcaacacctcgaccttgcacgtatcttcggtcctcctctgtaaaggtgtacctttctacgggtatcacgtcggctactcttattttcttcggatctcgctcgttaccccgtcgcatatctaccgggccgttaacttgctggaagggggcagcgtgatgaagaacaagtttgcggtctatgaatcccacctcgccaccaagctgcaattcatggtggatttcgatctctatggatgtggatgggtagatatcgaaaaggccatgttcaggcagcccctgccgcgtaagtctttttgccgtccttttggcatcgtgtcgcatctcaaagctcaccgtgatcgacttcagctggggatccatacagcgcagatcgagagggcatctacgacgatctcacagtgaattccagcatgttgcatcccctgaacatcggaaaagacacctggtcccagttggagatcgacatcgttccctggcaaatcctcaaccgacgtcggctacgccctcgttatctacacgactcgctgaaggaattgctcttttctgaaatgttcgaccccgaggaaaagtacgtgcgctcagtcagagaactttggaaggaggaatcgagaagaagggtcgagctcaatctgccgcccgaagaggggatggtgcccgctacggacgagagagtaccgagatcagttccaagtcaaggagatgtcggattcaagggtggggtttgggatagtactgagatgtgggagcaaaagctggacgataggatcaaggccgaagaagggaacaagaagcggaattgggagttgcgcaatataggtcggccgttacctgctgcgctcgatcctacatcggcagggatctgggacaaggtccgtgtaggcatacgtagcagtggcaaagacaagaggctgactgtttatggctcacagtggatccctacgacatttcaagtcgtcgagacgggctggccgaaggagatgaccagctcgcgacgcactcgaacaagagggaaaggcgctacgcaatcatcgccactcaaagctcgtgatcctacacaaagaccgacactctacgaagatgaagacgatgagcaggcggaggaggatgtggacttggaggagggaaaccctttcacccaattggcggcgtcacagaggttaccttctgctgttcgcgccgatctcgaagataccgaggtcgaggaggcaatcgacgacttggacaaggatactgtggagctcatcggtacacaatctgccaagaagtggcacgaatcggaggaaagggtcgaagcagagatgcaagggttccgcgagaggatggacgttaccccttccaagccagggtctcgtaacatcgaagccgatcccgatctcggagaccaagaagagatgcaggacgacgatttcgtcgggcatctaacgcagatgcaaagtcgaagaaagacccaagcgaatgcgctggattctcccgcaacggcctcacgtcgggtcagaggcgaattagccacgccggaaccagaatcgcccacgagaaagggaaacaatccgtactataccgactctttaccttctactccgggatccagcagaaactcgacacctcgaaagaatttgttcggtcgtcagcgcgcgggaaccccttcgccgccgcatcagccttttgctatgggcccaaaaaggacttctggaatcccgctttcgggcccgcccccctttaactcaccttccaagccagtcacaccatcgaaactacgatttgtctccaccggacagcccttgacactggaagaagatgaagacgatgttttcatagcgtcgacagctagggataagcttgtcgctgcggtacgctacggagaatctgcggcggccagatctgggagcagccgctcggatacttcagacgggaagctgggcatcccagtaatggttgacgacctttcagggcaagacgacgatgaagtagcacctttggcacagatacgtcctgtatcgcaatcaacgtccccacctgcatcgatcccgcgaccatctttgctttcgcctgccttggcgccacacgcgactcctcgcaagcctcctgctacatccatcttgaaacggcccagacgggacttgagcgacgaggaagacggtctctcacagctggaaccaacactgaaagtgacccaagcgaaacgagcccgatttgcggctgaaagctcttccgaggaggacgaggtaatggaaccgacttacgtctcgcaggctgcctctcgttcgaccatcggcaagtcgcatgccagtgatccggaggtcgaaccgatacgatcttccaccgaaatctccggcagctcgatggatcgaccgaatcgtgatgttcgggatagcgggattgtcctgcgtttaagccaaaattcggcttccaacgagtcgaacgagtcaagcgaaccatccgtgaccaacacttactactatgcgccaaagcctccatcacgctcgcacatcgaagctacaatacgttcatttggagaggtcgatatcatttatcaaaagcctttcttctccgtcccgcaagacttgccttcaaccaaatcgacgtatggaacccgaacttttcaattgcggactaatggcctcgaaacattgccatgtttctctttcggcagagaaacaacgcgtccaggattacgaaatataatttacaaaaggtcggaagtactgaacgtgaagacctggaggtatacggcagcccctccatccaggctggacactgcgcgctggctcgtcgaagaggagcagcttcggttgaacggcaagtccacttgaacccctcatctcgaagtttatctctactgacgtcatgaaaacagatgcaagacacgatacacggcagaagctagcatcacaggtgagcaggccgtttcccatgaagctaatgttgcctgcgagactcactgctacgtaaaaagttgggagaacctacgcaactcaagttccgctatagcgacagaaagaaaggaagcaatgcgcaacgcgagtcgcaaagcctctcttgtctcaccttggaagtttttggtaggtgtcactatgatgttcgtcggaaggagtagtcagctgaacgccgccgtatcgatagcgccttctcgcggtcgtttgctgcctgatccgaagcaggacgcgattgttgctgtgttctactgccttcaggattcgaagacgaccatggaccggcccatctcggagcatggctattacaccggcgtctggatcgtcgagagcgaaaagaacagattctcgagactaggcaatctgcaaggcctctttgtcgaatattacgagtccgagctcgaacttttcaatgaaattgtcgaccgtgtacgagcctgggaccccgatgtgctgggtggatgggaagttcacggatcgtcttggggctttctcgccgggcgagcctcggaagaatttggtgagtacataaagcgacagcgagagggcacgaggttgatcgatcggtcttcagggatgaacctgtccgatgagttctctcgcgtgcgcgcttctacgtcaccaggtggtcattcaagctggaatgtgacgcaaaattcggcattcaaggttgtcggtcgacacgtcttcaatatctggcgtatcatgcgaggcgacctaaaccttctgggttacacctttgagaatgtcgcgtatcatctcctcaaacaacggcaagtacgccttgacctctgggtttgtagaggagatgccgctaacgagacgcaatcctgtagtttccctcggtactcgacttccagtctgacttcctggtataacagtcaatacccgacacatgtcataaaagtcctacagtactatgctgataagaccagcatgtacatggagatgatggacgctgccgaaatatgcacaaagaacgcgtgagcgatcaccggaattggtacacaaggacaagcctttggagtggctgatcctcattacaacgcggcttagcgaattcgcgcgggtgtttggcgtcgatttcaactctgcgatgacgcggggttcccaatttaaggtggaatctttcatgtttcggatcgctaagcctgaagggtttgtcttgatttcgccatctagggaagcggtgagtcctatgacgctcacgtgcatactgtggcagcaagctgactcggtcggtcggtcttcctttaggtcggcaaacaaaacgcagccgagtgtcaaccgctaatccaagaaccgccctcagcgttctacgaagatcccgtactggtgctcgatttccagtcactgtatccatcgatcatgatcggctacaactattgttattctacgtgtctcggaagggtggacccattccgcggcacttacaagcttggatggagcgcacaacacattccggatggccagatcgggcttttgaaggatcacgttaccagtaagtttgcgtttagcaatgcgcttgacgttatcaaaatcctaatatcgagtcgcagtctccccgaacggtcggatttacgccaagcaaactttacgaaagagcttgttggcgaaaatgttgcgagagattctcgacactcgtgtcatggtgaaacaaggaatgaagacgtccaaaggaaacaaggtcaggctcaacgaatgaaggttcggccaatgcgctgtggtctgacacttggtccccgtctctgcagtctcttcttcaggttctgaatgcgagacagctcggcctgaagctcatggctgtgagtggtatagagaattgcccccgtcgatcaccttctaagttcgttggcgacactcagaacgtgacttatggatataccggagccagcttctctggacgtatgccgtgtgttgagattgccgacgacattgtgcagactggcagagagacgctagaaaaggtgattcgcggacgagcctgatttcctagatgattatggttgacatgccggaaaacaggcgattcagtatatcgagtcgcagcatcactggggcgctagggtgagatctatcggcacttcgaaactctgcatttaaacattgacgtacatacgtgcaggtcatctacggtgataccgactcgttgtttgtgctgcttgagggtcggacgatcccacaggcgttccgtatcggcaacgagatggccgaccagatcaccgctcggaaccctcggccgatcaagcttaagttcgaaaaggtgagccgcgcagggagccgaacctgcgccatatggccggctaaacgatcagcgagcgttcgattgacaggtatatacgaaatgcgtgctcgaggccaagaagcgctacgtcggcttcaagatggagtcgatcgatgagacgccgtcgtttgacgccaagggtatagagacggtccgccgagacggatgccctgctgctcagaaaatgttggagaacgtcctcaagtgagaagtttacgggttacgacgaccatcgagaatcgtcgagctgactttgtattcggtcctgccagactgctgttccgcagggctgacctctccgagatcaagcgttactgcgttgacgagtggaccaagatcttgcagggcaagatctcttaccaggacctgatcatctccaaggaagtcaagctggggagctatagcgagaatggacttcccccacccggagcggtcatcgcgggaagacgtctggcagaagacccgatggacgaggcggagtatggcgagagggtaccgttcatcattaccaagcatggagcgtcggatcgattggtccacaaggcgagagcgcctgaagatctcttgaatgataggcaagtcgcggaaaagacgggacaggcaaggatgagatgagcaatatgctgattgatagcatttttatggggtgcttcacaggaacatcctgccggacaccgagtattacataactcgccagatcatccccccgatcaaccgggttttgaaactggtcggagtggacgcggccgtatggtacgcgcagatgcctcgacgacacttggtgtacgatcggttccgggtcaaggacggcaaggggaaaatgggcaagacgctggacgccacgtggagaacggcgcattgtctcgtgtgcggtgtgaggtgcgggaaggatcagggtgagtgtttcgactttgagacgggtacaagggagatcggaatagctaattgagccttgtcgttgtctcacgaaactctgttactcgtacgcgcgcgcgatgtgtaccgcagaggtatgtgaggattgcacgtcccctcccaacctggcctcgagcctgcacgcgctctccagtcgttaccacatctcgacctctcggctcctctccatccaacgagcctgtgcttcgtgcgcctcgacggccgtctctgaacacgtcaagtgcgagtcggtcgactgtcctgtcctttacgcccgcatcaaggcggggaacgaggtgcaggataccgaggggttgatcggcgtcgtcaacaggttggacaagcaggagcggaagggatgggagggggaggatatgggagtcgaggtgatttcattgttggactcggatgacgagtgacgaggtgtgagagggaggattgtgtgtagattgtgtgtagattgtgtgtagattgtgtggcgattcttgttatcgccgacacggcgctagtgcgctttcgatgatggtgtgcgcgcgattgtaggagagacacagtgatcgatccatgctcacctagtttttgcatccgcggttactgtgatcttctggggagcgcgtgacgtccaactcgggggcgacgcgtcagagagatccgagctagttggccggtgggatgggtggccagtgagagagagctgagactctgggatgaaccgcccgtgaccccctgcacctgcttgctctaggccccctggcccctgctcccgctcgcccctagctctcggccaatcccccttcgccttcgccacccacccacctcacacacactcagactctctccactcacccagaccatatcgaattgaccatcgatcatcgacaacgtccaccgactacctcacgctcgagtcccccttctcttccctctagtcgttcgtcgctcaaacttccagtaatccctaaaaaaaagagagtctagcaacctccaaatctcaactcaccctcacggaagaaaccaacagacgaaaaaaaggccaactctttattcaatatggtgagtgaacacgcacgccacctgtttcgaccggacgatcgaggatagacacggatggatggacctaggaccaggaggggacgacaaacggaccatcaaaggatcaaggagttgggagtttcacggccattcgggcaggacgaccggtcacgagggcaaattgggaggcgaatacggggctcaatgggtcgcatgaccagtcacgatccgagatggcagagatgacgttgggcatagtcgaacgtagacatctcgagttggaccttgcacctatttcatcttgacctagcggtctggctacaataggcgaggtctggctggacgggggtcgatggctagtcgacgtccgaccacggtggcgaggccgcgcggtcacgatggaaatttgacggggacttttcgacgtcctccgaagattatgtcccgcctcgatagcttcgacgacaatcacccggcgaggcgaacatcaggaatcccatctatacaacccgtcatccgactagaactctcaccatctacctgtctatcctcgatcctttggtcgatccggttgaggtcggatcttgactagaaactgacgcacccggacctcttcctcacttgtagactctcgctatcgatctcctccacccctccgccgaggccgagctccgcaagcacaagcttaagcagcttgtccaggcccccaggtcgttcttcatggacgttaaggtgagtccaggccgagtccaccctatgcgggttagcatcgtgaatcaggattgtcgtaactgaccaccacttgtcatggtcttcgtctctcagtgccctggttgtttccagatcaccaccgtcttctcgcacgcctcgactgtcgttcagtgtggatcttgctcgaccgtcctctgtcagcctagcggaggaaaggccaagttgaccgagggtgagtcttgtcttcgaccatcatcatcatctcgatgaacaccccggactgatccatcattcccgacttgcattgccgtcacacaggatgctctttcaggcgaaagcagtaaacgcgaactaaaaggaaaaaggaacctcttcttcttcttcttttgggatgcgttttcatgattgtcttttaccacgacggccaatctaccctttgtgtccttgtcacctatcctaccctatgacgaccatctatcatcacaaaaccatcgatcgaggcgagaaggggtttcgcgtttgggtttgggttcgggttcggctccggctctttgggtggtctcggttgtcggaaggatggaacgtgtgcatttgaagcaggcgtctgatatgggactgttctgtggagcgtgatgtgcgataggacggactccacgtctcacaggcacgtcaagggcgtgatggggttcgacatccttgttttggtcaacagctcgaggctcttcgataagagtgaggacgatcgggtatcacgttcgtcatggtatggtttcgtctagagctatgaccctccgctggaagtcccgtagttttacgctttgttggctatcctggcgtcaacagccgattatgtgaagtttcgaagtagattagcgactgcaagctctttacggtaggggtgccatatcggacccaggcggtcaatacatcagttcaaacagagcaacacgagaggtcgcccttcccgatttaaagatgcgatccttggcgatagaccctctccatcgtctgtagtgacttttgggctcttcgaggcatcggtcgaaagtctcgattcgtttcttcttggtcaaggcgacatcggcgatgcgtccgggtagtcttttagaccaccgagttgtctcgctgggtggtgaccggatcgccttgctctttggcaggtggttcgagcatcggttccttccgggattgggcgtcaggttgtcaggcaaacatgggcggttcgctctgaccttctcgttgattagactcactagaacggtttttaatcagacttgcaatagagctgagctgtatcataagtcatcagcctgtgctcgaggtccctacggagagtcttccaaggccgtagtaaagaatgttccaggagctatcggtaatgtactgtccagtagccacgcgaacagttcagcaaacggcgtgatcagtacgtccatcaggcgatgaactcttgaatcagtatcgaatcataagatgagcgtcccgagagtagggtattcgcatgcatctgcagcttgaccgactggaggcgtccctcgtcagcgagtcgaccgcagcacgtcttcaccttttcttaatgtcacgtcggcaacgctatccgctactacagaaaggcgtggaatgaagacgacggacgttcaggttacatattatctgtacgggaccgtcgagcttacagctggtcatggtatgtaatgatcttgggggaggtatgaacctgtgcacaggagcggtccgaatgtagtcgatgatggagtttctgtgtcaatgcaaatgatacgatccgagtcgccattgcgttattgacaaggtcatgattgacgatcgtctttctggccagttcgatgcagtaccaaagactgagacgaccgagaagccaatcctgtgaacagttgtgtttcgatggccccatggctgaaacgccatgacaacctgcgacatgagattctatgcgttttcaatggaaactcgcgggccttcccattttatgcgttttccccgttgaaatccctctcaagagctgaattgcagtttccgaaaaaccgcgatggttgggcgggtcagtcagtctgcaacgagcgagcagagcgacatcgacaaacatcagaatcgagttgttcagttacaatcaaactaacgaccagcgcccacaagtcctgtcctgtacatcacagattctcaatcaaaatggcatccttctctttgcctcctatctacgataacgaggacaagtcctggggacccagctcgagcaccatccccaaggtgttccaggagtcagttacaacaaaaaacaaagtccgggacatttgtctcgatgacttgcctgaatactgacatcattcgtccctttcgtattcgatagcatcccctacgctcctcactccaaggctgacaagatcaaccacattgccgattggtcgaccgagtctaccaacgccgagcagggccaaggaggacgaggtgctcgacagggaggtgcccgtggaggtaggcgagacaactacggcgtctccgcctcgaccgccgctgggaacgcgttcggttacgttcacgacgaagacgagaaatcgttctccctcgtcgactcgggtcgggccggtgccggtgccacacgtggacggggcagcggacttttccagaacaggggtcgaggcaggggtgctcctcgaggatcggtcgggttccgaggaggtcgaggaggattccaggccggtggtgccaggagtgacggtcgacccgagaggggtggatggggtacctaccgtggacgaggcaggggtggatacggtggatgggacaaggtaagcgtgtcagaaggtcacgccactcaatcttgtctcgggaaccgcatcctcatccaatctttctcgcaaactatagccccagcgagtccgcgattggtccattaccatcggacccgagtggcagatgttggaagagatcacgtttgcccgtctgcaaaagctcagtctcaacgtccaggagcccgaggatctttcgatccacggtaccatctactcgtacgacaaggcctttgacgccgtcaacacccgaaacgacaagcctctccagatcatcgacatggtcaagtacaacactactaccagtgatgaccctgttatccactcggtgagtctgccgtcggtctctcgaccgtgatccccaattgacggacaaaccgttccattgttttccctacagctcgccgagaagaacgaggccaatgtttacactaccgacgctatcttgtcggtattgatgaccgccaccaggagtgtcaactcgtgggacatcgtcatcgttcgagagggcgacaacgtttacctcgacaagcgagagggtggacctttcggtgagtctgtttttgacgccgtcttgatgccaacaatcccaagctgatcatgaaatggcgatgtcaccctgcagactttgtcactgtcaacgaaaacgcggccgacccccccgccgacaccgacaagcccgatgccatcaactcgcccgcctcgctctcgctcgaggccacctatatcaaccaaaactttgcctgtcaggtcgtcgaccagaccaagcgcaaggccttcaaggatcccaaccccttctactctaccgaggagactgagcccttggcgtcgtgcgcttaccgataccgaaagttcgacctgtcgttgcaggccgagcaggaggctaccgaaaaggtcaagatggtcgtcaggaccgaagtcgatgcctaccagaccaagaaggaccagtacatcaccatcaaggccttgaacgagtttgacccccgagctcagggtagcggcaaggcgcccgattggaggagcaagctcgacgcttcccgaggtgccgtcgtcgccactgagatgaagaacaacagcgccaagctcgcccgatgggccgtacagagtgtcttggccggtgccgacaccatgaagcttggtttcatctcgaggcagaaccccaaggatcctcagaggcacaccatcgttggagtccagagccacaagcccaaggactttgccggtcagatggccgtctcgcttgccaacggttggggtatcgttaggatgatcatcgatctctgtatgaagcagcccgagggaaggtacgtgctcgtcaaggaccccaacaacgtgagtttcgaggtgtagtcacattgatcaaagatgagtcgtcactgatacctatactgctactcgtcccacttcagcctctcgtccgattgtacgccgtgcccgccgatgcgctcgaggctctcgaagagcaggacgaggaagaggagcaggacgaagacaaccaggacttgtagttgtatcattgccacagtccatgtgcaacttaatgatatatattccgtcactctggcatttaggtcatgttttgctcgaagtgtagctgatgcgatttgcgacgcgtggtgtgacaagtcgtgctgaaggtcgtaaaaccctgccaaaggcatcttgacgtagaggcagtagatcaatattcctggaccctggcctgttagggttctcctcgtcctcggaatttctaaccgggaaccgaccgtgcaatttcaacatcggccccaacgtggaatagtacaagtcgattggcgaagagcaaagacaggtctcgagggcattcacagaaacacaatcgatcaacattgagaggggaaagtccgtgaggatctgggtcaggtcataggagaatcgcttcaagcgcagtggcgcaatgaagggcgacggtttgagcttctgagactacgtattattgattgatcatcaaacattcgacatgatcctggcaatcggattcctcttggaccaatctacagtctacttcttggagacggcagcggcgaggtccttcaaaccctccatcctcttgtacttggcatcggccaggacacctttcgtcaagaagcaacgagggctattagttcgccattcgagtcaaagtcatgtcacctcgcccacactcaccagcatcagcgtcaccgctgaaagatccggtccactggacaaaggtggatccctgctcggcaccagaggtaacggcgaagagacggatggtgctcaaagacgaggtgtaggagagagcggggttggaggagatgattgagaaggtgatgtagtactcgagcgagctgtgctcttcctgcttgacctcctggacggttccgtcctaaagtagcaaccatttgggatgtcgtcagtatgagagaaaggaagaggtcacgatatgaatgacgtcgtcataccttgaaggtgaatcggtagacgtcggcctcgtcagaggctcccttgacgacctcggacttgtcaagagcagaccaccattgagagaacgaggggagcttgatcaagtgccagacgtcggtcaagggctatgagatatggaagtggatcgggatgagttttcgattgcacagcggagcgagaggaatgtcgtttcaacgtacggccttgatgacggcagactcgaccatgttggtcgaaacggggattccagcggcgggcatgatgatagtgagttttttggtactatgtatatatgtttgtaaggagtgtttggagctatcctagaggagttgggtagggttcgatatgatcgctgtatattattgagggcaaagatttgggtgaggtcctcccttcctccctaccgtgcgtgactcttctgacgtcaaaacgcgcgtgacgtgatcgagagagacgcgcttctagcgaatcaaacgcaggaaacaggaaacaaggccatatcatcgtcgtcgatgttgaatcggaccgatccgtagcggcacttggcgtggaaggttacgttggagcatgcaaaactagacctgctgcacttgcaagagttactggagacagaccccatccattgaaagagacgacgcgcgcttcgtttgcataaagctcgctttcacatgcttgaaccggttgcgagggagagcccggacaagactccttgtgtcattcgcaatctcgcttggcatgctagcccactatgatctgacaacaaccatgaaagtccgatggtttgattacatatgcctggaaccctcgtcgccgttgtccacaatggcagaaggtcgttcaccgccgtcttcttcgtctccctgctcgaggtcaaacgcatcactgacgaaatcgatactggcgtcatcgtcttgccagtcttcttcttcttccccggcgtcattcattttgagtgatctcaatctcacccacatccgtcttcgaacccacccaccccatccgctccaagcgacgtttgggccccagccgtgtttgcgaaatatgtagttgtattcccaaccgcgttcatcggtcacgccatcctgccgcatgttgactaaccacggggtcaaccaggtccaatgagaactgggaggctggaacgtatgtaggtcgtagggcgtagtcatggactttttctcatgctcctgtcgacgaagggtatgtctgaattcggagtaggcatgcgccttgccatccttgtgctggtcatgatggtgatggcgatcccgtcccccctgatcgtgcttgcggcgattcaaggcgaaaggtcgactcttgagagcgttatgcggtggcgggtcgcttgaggcgctcctatcagtcgtcggaaacgctcggacgggcttgagcgcgtgaatgggcacggtataggcattggggtcaaaggggaagagcgtcgatttcgagaaatgcggagtacccatgaacatgatgctatgataaggatgggagcaagtcatgttagcgatagtcacgggtctccttcgaagggatcgcaccctctttgattttcgaacaggactgaagagcgtaaatgcagactgtcagctgcagagtagagacaggtatgaggacctatatacaaacactcaccatcccagacgtattctcgcgcgtgacccttcttgagcttcctaacttctgctttggcctgatgcctctcttccggtctcggtgcaagcagatttatgagtgagccggacgcagactcctctgcgttcgacgagtgtggcttcgaagaagagcctacagtttggctatgctccggcactccatcggggaaagaggctgacggaagcttcgaggacgaaccctctggatgatcatcgctcgacgggaaatgaacgtgctgcgcacgaggtagcggtaacccggatggtttgacgtcgaccggcttggcaggctctgcttttctgacgagcagtttgataggcggtgggatatccgggtccgttcgtttcgatcgtctcagacgtctccgcttcttgtcctctgaatccgcctcggccacctcttcatcgccatctgaatccccttcatcgatatgatcatcacccgaacgatttctcgtcaggtcgccgtgcttcgacgaagttctcgagtcggtcttgcgcagatgagacgagcggaacatgctgagcgagatcgacgacctgtggcggctgtgatggatgtgacgacgagaggacagagcctggtcgacctgtgctgcgagttcatcatcgccgatgactgtcggtgaaagcagcggcgactgcaccggcgaatcggccatcgtagaccgtgacatggatgtgaattgcggctcgcgtcggtcaacctctatgtgatgcgatatgctgtgacaagtcgagccatgttgggcttgtacaggaatgtgaagggctggacaaccttacaaaatgcaaggtccaggcgatgatgcatatgctcgcagcggtcatggatggccagcatgatttgcttccgattcatttagagcgacccgctcttgcgttcacatacgatacgcgatgcaaagtcaggtcatgaacacgatggacatgcttctcagtcacacacgttgcaagccgatagccgttgggaatcacgatcgggcgagtagcaacattgctcgatcctattcctattatcagactcaccggcctgtcatgataccatagtgtagtatagttgttcagctgtgctactcgatctaaccatattacctgcctgcatctatccatttacctttcgacgcgctcacgcgtttggacgcgtttggctgattccgagagagacaggtcggtcggtccgtgctcaacaaccatgtttattagctattagacatagtcaagtagagtgcgcatgacctcgtcttgctataatcatatcaacagttcaaacaagacaatacttctagtcgataaaggatgccagtcccagtagccatcgctcaagggtgagcccgtcgggccttgctgatcaggcaacgatcggaatcacgactgacgaggggaatcaaactttcattgctttccatataggcttcaaatggaggacgagtaaattccgtcgctactgatatcgtgaagacctggtgtcaaagacctgacttgcttttttcttcttgtatagtgccaagtcgcccgaggtcatgcttgcattttatcgccggctcttcccttacaagccattcttcctctggctcaaccaggagcacggtgagcaggtctcgctcgttgtgtaccgtggtgtacagctcaatgaatgcctgttccttcacttcgtagtaccctctcgactcttcacgcaccgggaatttgccttcacactgggagagtcgacctatgttcgatacaacagcttcaacaatgtcgaggatttcaagaaggagatccttcgtgcaaaccccactcgtttcgagatcgggcccatctacaacgtcagagtgagttttctactagactaagatggaatcgtgccactctagagctaagccaaaccggttcatcgcgcagccaagagaccgtaaatcggtaccacaacacgcccttcgtccagagctccgggaactcgttttcgacatcgacatgactgactacgacgagattaggacatgctgttcgggtggcaatatttgtgggaggtgctggggtttcatcgccgccgcggtcaaggtgctagatcagagcttgcgaggttggtgctgagcgtactggggcagacgatgataccaacgcaatctgatcgacgcgctctacagaatcattcggcttcaagcatctcctctgggtctactctggtcgacgaggtatccattgctggatctcggatcgacacgctctgtccctgaccgatgatcaacgaagaagccttgtgcagttcctagaggtcgtcaaaggagggaaagaggtcgcgaaaaaggtcaatgtcagaaacggaaacgatatcgctcctctgaattccaacatcgagtgagtcggctttcggacttgtgcacaacgccatgtgttgagaacttgacacacagacacgccctcgatacgatcaaggcagactttgtcaggatcgctctaatggatcaaaactgctttgccgacgagaagggaaccgaaacgttgctgtcgttgttgaccgtcgaccgaggtcagtgaatccatgtgttacagcggtttggcaaaggctgatctctgtctggctattcttctgcagatactgccgattcctggcgccggaaatggtcgtccgcgaacctatcaagcatggagaagtggcaagaggttatggcatatggtgctcgattgaaggctggaaccaatactttggctttcgtacgtctccttggcggatctcctgcgatcgattgaggtcaagctgacgaatcgatcggtcttgttatagcgaaaattttcccactcgactgaagatctgattttacagtacatgtacccacgcatcgatgcagaagtttcgaaacggaggaatcatttgctcaagagccccttcgtcatccatcctggaacgggtgagcacatggcatcctctctactcgccgtcatgcacttactttcatcttcatcgacagggcgagtctgtgtgcccgttgaagttagcaagatcgacgaattcgagccttcggcagtcccgactgtcggtcaacttttacgagagctagatcgaccaaccggacatactggcactgggacggtcaaagctgaagatggagaaggtggagcgcagaagatcgagcctggtgagacatcaaaggcattgactggtctgaaggtcgacctaccagtactgatacaggagaccggcgaccttctcagattacgagcggacaagtctcaagccatatgttgatctattcgagaagcatgtcacggcggtgatgcgggataatcgtgaggctaaaaaggtggttcaagacaccaaagtatcgctcgacttttgagcataattagttgtaataggttttatcatctctagttgtacctcttgtgtcacatgcaccacgtgtgcacggaacaccggctgtcatgctcctgctcgcgcgcatttagctgatgcgcctgccatgttgtatggtcaaatgtgttgttcatcacgccacgagacgaggtcacaaagccgggtgctatccttctcctttcactgggcggctaccctgaccccctttcgcacgaagatctggttggcattgggacccgaaccgggagcgttgcagtcccaaacctgcacgacaaggtggaagccagcgttatgagatctcctcgatccacttatctgaaagtgagtgtccgacacttacctgggcagcagttccccaattgtactgtcctccaggcctctgaatgtccaagcaagcatcacaatcgcgatctgtaggcgcaacatgatcagttttgaagggagttgccggaatacaggccgacttactctggtttaccatgcggatcgtgccatctgcaccgaacttgaagtcctgagacctgataggagcctggaattcaaacggaagataagctccctcattcgatttcccccgcgatctgtcttaccccactgttgtccttgtagcattggtaaaccttgatgagacggacgatcagcgcctctcgttcggagctactatgcgtatggaaaaacaaaccttgaaatgagccgcgttttggggtccctcagttcccggatagactgttccactatccacacagaagttggaccctccgaggttgagcgcaccatcgcgcttgttgtcgataggaagtgcccaaagctggccagtgttccgctcatcacactcttcgaagacgatatcccggtcgttggacagccaattaccttcatgagttgtggtatcgacagcgaggcaaagcttttggttgtcagcgggagagatctggtagagcgcgtaaccgtcgggcatgggtttctcgaatggtttgggacattcgcactccttgcagtccgatggtggaggcggggcgtgagggccgggagcgggaggaaccacgggcacagtgggcttaggttgaggttgcgccgatgcagtagtcttgaccaaagaaggttgcgccgaggtagtagttgtcgccgatgaagattgcattgcggagccagagggacaagcaccgccacacttgtcgatggggttgtcaaccacaccggtgggttcggtgggggccgcagtcgttgcaagcgcgaacagggcggatagcagaacgtacttggagagcatagtcgaggtgcgaaagcaatgtatgtatggggagatctcggagtaggaagtaagtatgcaggactaggatggctgacttgatgtatgggccgaaaacatcaaagattcgttggtgagttttgcatcccgcttatatcctgttaagctacatcgcagcgtcatctgcggaacatgtaaaaaggtcagcgtatcaagtgactgtcggctcctttctgccagcctgatacgtaaggggtctctcctgacaacccttttgtaagatgacgtgtttaccattggctagcaggagtcgaccgtctcatcgcgtcgtcaacgtgaaacagcagacgagtacgcaaagttgataaatcaagattgcacgcgtgagaaatgctttggcccggcgattcgcgggatttcgataatagggtcctcccttgtcccccctttgtttcgactgagggcgacaagtctatggatcattacgtaccaggaaagaggcgtcggtctcgtggtagccgccgctgtgcgcgatgctgccgtggtgccgctcgcgcgtcttttgcccctccctgcgcccccactgctgtctctctcccgcgccctgcgcccccagcctggcctggctctgcctactaccatcgctctcaggaatgagccagcagcatccagcggtgcaatcacccaccaacgacgaccacgacgaccagcaccacacatcatatcaacatcacatcttgctctatcaacaactctcctaagctacgaccaagactgctctgctcttacacacacaaattttaccacctacatcaccacttatccactccatccaggtaagcatcactctcgccggtggctaagtcgtattgggaatccggcatatcgcttctcgcgtcatcaaaatgcactcgcccctggtctacctttcgttgtcgacctcgagacctggcgccgtcttgaccaactcagacgattagaaaccgcaccggacgagcagaaggtgtccacactcgtggtcggaccgtgaaaagcggtcagcaatcgaacttttaacggccattcgaattgtcggaatgatcggaagaggctatgtcgcccgacaccttccgctttcgtcgaccggtacacgcctttcttggagcgtttgacgaccaacatcgcccgatcctgtccctctgcacatctagtccattcatccaaaatcagtcgctgatcaatctgctttggcctgcttctgattgctatctgccccatccggattgtttacgcgtcatcgttcgcaatacaaatacatcccttcccattcgacgcgatcatcacgaaacggctcgctttctaccgtctttggacttttgtcggatcgcgactatgacactcttgcaatggcgtatacaccaactccacagtcaaacatagtgagttatacaaacccatgtcccttcgtcgacacatctttcgctcccaatgagcgtgatgaagagcgatttgatggtggcatgtgcatccgtcgtccgacctgttgctgatgtgatcttcttgcagatgcctgcctcccgtgaagactccgtttacctcgccaagctcgccgagcaggctgagcgatacgagggtgagtctagaaccatcacatattaccctgactcatgtggctgatgactttggaaatctccagagatggttgagaacatgaagtcggttgccgcttctgaccaggagctcaccgttgaggagcgaaacctcctttccgtcgcctacaagaacgtcatcggtgctcgtcgtgcctcttggcgaatcgtttcctccatcgagcagaaggaggagtccaagggcaacgaggctcaggtttccatgatcaagggatacagggagaagatcgaggccgagcttgccaaaatctgcgaggacatcctcgccgtcttggacaagcacttgatcccctccgctcagaccggagagtccaaggtcttctaccacaagatgtaagttggttcttttcagaccggttgctcatctgctccagctcatagcaactgcctcccgtgtctcgtaggatgggtgattaccaccgttacctcgctgagttcgccaccggcgacaagcgacacacctccgccgacaagtctctcgaggcttacaaggccgcttctgacgtcgccatggccgagttgccccctacccaccccatccgtctcggactcgccttgaacttctcggtcttctagtgcgtttccgcacgatcctggtctttcatccgagctgtcagattgatgacttcgacttcaccaacagctacgagatcttgaacagccccgaccgagcttgtcaccttgccaagcaggccttcgacgatgctattgctgagcttgacaccctttcggaagagtcttacaagtgagatgaggatttggtgataatgtcagcccttaaaggcgctaatcgagatcgtttttacctttcagggactctaccttgatcatgcagttgttgagggacaacttgaccttgtggacctcggatatggacagtaagtttccccgccgcacgccttcacatctggcatttcgctcacactcgcctcgctcgatgtacctagacgccgagaaggaggacgctgctcccgccgagaccaaggccgagcccagcgcataaatctccgtagttcaggtgcaaaaggaggaacgatgagcgttttgtgatgttgcgggccttttgtttctaccctttatgtttcttctcgtcagaacctcgggcggtcttgcacttccatcgagagttcatctcatgtcttcttttctgtgttttgagataatgaatatcggattcgatcaacgacaattatcgctcttgtgctctgctagttaccgtgtttactctcactcagctttcctcctggtcgtgcagtggatgacgcggcacatttgttaacaaggttcaactcagcagcggtccgggttttgcatcatcagccttgcacgtcgtgtcgtaggcaagctcggtgcttttcatcctccttcacaacccactttgcctcagggatcgaactgcatctgcccgagatagaaactgtcatgaagcctaatcactcggattgaagagcgggagatgttttctctgacgtcgtccgaatcgacaaaccagctattccaacctgttcaactcacctttcgcagggttttggccgtacttgaagcaatatttctgcaagccgaggctgtagttttcatattcggtcttcaccctggatatctgatccaccgcttgtgctcgacaatgcaacgcctcacgagcgtgttcggtttgggcagcgttaacctgagtggtccgagcaacccaaatcagggcggccatgcagatgggcaggtcgtcaagaggaatagagttggacctggattgcgaagaaggaaagctgcagtcgcagatgaggagaaccggggtaagccgatcgacttgacacgatcctggcaaggcgttttgacctagaaagttatcagcgatggactcaacctatccgggaatggtcaatttatctggcaccttatgctacatgaactcgatccttcaggtcagtgggcgagcttgtttatcatgtgtaacgaaggctactgatctgatcaaggtaatgccatcgtaaacacaggcgtttgcatccttgtcgtacctcaagacgtacctggagcagatcatctttcttgctgaagaagttgatctgaacacgccagtgattgatgctttggaaggaaccatacagggcgagtcctcgtaatcgtttccttctgggaaggaagacatactgacaccggttgtccggctttcagagctgaacactccttccacttcgcgcccgcccgccgttcgcccataccacttcatcgaagcgctgtccaagctgccaccagtcaggcggctcttgcagacccgggagcatcaagatgcgcacgagctatttctcttgctcacaagcgccgtagctgaagagttgaaagcgcttgagaaagagagacgaatcgacagaggcttatctgcgattctggccgggaccaagattctgcgcggatccgacgggaacgcttcgattcaggtcgccaaagacaagggtatcgaaaaggagcggttgctttcgccatgggagggtctgacagctatcaggaggaattgtctcgtttgtggttggtgcgaggtgattcggcacgaggtcactggtgccatagacgtgaccataccaacgaacgtaagctacctctatgagatacggggcaaattgtggcacaaataccgacctggattgtttcgacttgtagggcgctgcatcgatacaagaatgccttcaacaagctatggcgcccgaaatcatcgatgatgcgtattgcgattcgtgcacattgaatttgacgatcaactactatgaatcagaagaccagcggctatcaagaagcaatgtggagcgctcggacgatatcgcatctgtggttgcgccagcggataaaccgactgctcgtctagctgtggagtccattacgtccgctggactattatcgaacgtcacgctagacgagacgatgaaagggtcgaaaccctcatctgccaaaaagcgacgggcccgagatgcgcgagccttgctaaggaaacttgaagatgtcaagaagagcggaaatatcggagagacagtgggaggaggcaaagcgaaagcgcgggaactagggatgcaggatgtcaaatgggtcaagggacaaggtccgagctcgcgcatgagcatgattgcaagagtgcgtacgatgccagaaattagcattgaaccagtattgacttgcgaaacattcacttgttgttcagccaccccatatcctaacacttcatctcaaccggtcaggcttcactccatacggccagataatcaagaagaccacccagatcatctttccccctctactcgatatgtctggctttacgacgtccggcatggtggcaatggacgcgaaacagccgatctcatcgaagaacggacccgacgatcagtctcccctcgttgcgagcctgatttaccgccttaacgggctcatttgccactatggatacacccacagttttgggcactttgttgcttatcgcaggaaaccggaacccaaagtccaatcacatgctgacagcgttctgtatccgcgtggccgatggctacgaatcagcgatgcggatgtgagcgaagtaccggagagcgctgttctgggagagcggagtaatgctttcctccttttttacgagagattagcgaatgacgccagtgaagccagcgttgacgcctcagtattgccggatgacagcagggttgcggacctctcaggaaaggtgaacgttttggatgcgctgaaacgccagcaggatgtttcggttccccctcctacagatgacataccgaatcaaaccacccagaaatccgtagattcccttgattagattattagagatgattacagcagcatgtacatcatatgtcagatcaggattgaagataacgtatatgcattttgattgcgcaggcgtcatgactcatcgctgccggctgaggccaactaaggtgagcccagcaacatggaacacacaagatacgtctgggtgtatcttatcgctgggatgagtccagtataaactcactctttctcgcaacatgtcagaccatagcaatggagcggagataccctgcgatagcgttccttcggagctaaagtcgtcatgcgaacaaatactcaagagggcaagggagttgcgaaaggcagatccagtcatgtgttactggtgtgagtgaatggaacatcaatcgcttggtgacggtcgaagcctcggataaacacctgatacatcttcacaatcaattccaggctgcttctccgctgccaactcggccatgaatgttccctcgaggtcggctgatgccactcagtttctcgtcaaagtactagatgtcctggaatcagtcagtaaataaggcagactcaaaaaagcgctctgcagacttgctcattatcacaatgtatcttaacagatgaaagctagtctagtttcgagcgaatcaatagagacagctacgatcaccgacgaatcggctggaagtgcatatgtggaaagcttcgccatgaaggtgttcttacaagcagacgacgaggatagagcagggaaggcaaacaagtgagtggtgtcccttggctcgcttagagagggatcctctagcttacagtttcacatgtgggaattcaggagcacaatccgcaaattcgtcgtcgccgctcaattcatcgaggtacttcggtcgttcgaggcacctttcgggatgagagaggaggtgagaagcgatcgggccaggtcaatctaaggggaaagctacatcgtgaacgtcttatgatccttcagatggagcaaaagcttcaatacgcacgttggaaggctgctgatatcgccaaggctctgaaggaaggaaggaaacctgatccaggaccccgtaagcttcggatcaagcttgaagcctatgtgcgattggagacgcaggctcacgccgtgcatatttacctactcagctgaggttgatcctctcgaatcagctctaggcggggatgacactgctgccgagaagattcccgctgcgctcgggccaacgccgtctgcaggaccgtcccccgccctgtcgagcgcaccgagtgacaagattagccatggtcttcctgttccagctcgtcatgattcgactgggagtggtgcttggagcactgccgctaccccaggcgtgagggatgaagacgaatcgagagatggattggccggcattaacacaggcgaatctgaaacgaaagcagcgtccgttcgtccaaacggagaccatgacgagaaggtatctcgtcgtgattcgaatgcagacaagaagaatgtgcggttcgctggacctgacggagttccgctaagcccggccgcaacgttcgtctcgatggactcgtacgttgcaccgctcggtcctcctccgaccatcttgtcagatgacgatgacgggaaccgcgccacgtcgcctgccagtgtcgtttcgaagccgattaggcgacaactcaaatcgaacgatgttgacccggatggtccctcggcgcccttgaagacgctgttcgtcgacaagactccttctgccccgttgccgtcaccggaagctgtcgctacagctcccgcccccgttcagctggattctaaatccatcgagcgatgtcagaagcattgcaaatgggcgatcagtgcgctcgattatgaggacctcgagacggcgcgtgcggagcttcggaaagctctggaaatgctggggtagcaaggttgcttgcagacggtaatacgtgtcatgtcctattcaagatgggttccttgcgttttagattccactgagactgaaatctgggttgtaaccttatatatattaatacatgtattggcaaatatattacgacgtcactgcatagcgcaagttgctcacgaagcgagcttccccaagcgaaacttgactgtctggcggatgcaggcagcgatcgaacgaactgatcaagccgtccactacttcatatccagctgaaacggctatgaccccgtcataccttcatgcttttccccgtgatccatggcagcagcagctcgttgtgtctggctcgcgacgcacagccgatctcgttacgacgcctcttacgtgaagatctaaagtaacaacgattccatcagctcctagcgcgatgcgagcatcacacaggaatgttgatggtgatgatctcggtttgtttgttcttccgctgcgggggctgggacgagcgcgtctctcgagagagccaagccgctaccgattctcggtgggggtgatgctgtgcgtgaatcgaggcaaaggcgggcgagggcggagggggcgaaggaaagcagagacacgagttcgcgcgcggcacgaaaaacaaggggaacaggagatcaggcggcacggctcgggaggcagggcggaggtgtcgctattgttctctggtggtggtgatatcgaatatgcattgtgtcgatagtagagagggtgacgagagcgcgcgagccgaagccggtcgcgtaggagccgaatccgcgtcgcttcccgtaacagaattgaacaaccaaggtcaaccaggccgagggttttgggatcccgctacaggccaaatcagtagatgttaatcggactttgcgacgacgtagccgtaggtaatgattagtaatgctgtctagtcaaagttacgtcaagtatgccgaaagtaattggtgcctttcgaatccctcctgcatacgcgactcgggtgtttctgtctcagggctcctcgtattctgtaggtacgtgacagatagctcaccttcaatatgaagaagattcaagagaccacttttggaggtggttctgtttgccacggggacctcataccaaaacttctcattatatttacatggagatggcaaacactattcacgctaccgcataagaagcgatgtctaccgtgcttccaggatatcgagcttgaacctggctcgagtgtttaaaataaggctgtcgcaactgctagagcgacaacaatctgcagcatcataatcagtcgtggtgacgtaggagtagccttcatccccatgttctgagtggacggggttccattaggcgcgacagacgttgtagcagaagggaaaggctggacaggggtaggaaatgccgacagaattagcgttttgcaaaacgtgagcgatgtgacctacagtatatggtccaggaatcgccacagtagaagaaacggattgcgaagccgtcgaaggggccgctaaagccggcgatcgagctgagcttcagccatcggttcccctttcaaataatgcgtcgttgctcaccgataccttgcgcaatttcgaaaggttggctttgcgcgaacacgtcggaagggtttgtagtattgacatagcgaatccggtatcccttcccatctgcgagctgaggaagaagtaaagtgagggcttgtagggacgtaggaactaaagaggcatcggtcgagcatcagctatctgaccgaatcgagcgagatagaacccatgaatcaccggtatcagctaaggtagcgttgttcccatctaattgctgaatggtgatccggaatgaggcaggatcatctagaccggatgaccacgtcgtttggaccgtattgtttttgtacctggtcgagtggaaacgaactcgaggcgcatgggcttgagaggccctagagattgaccaggcgggtatcacataccagacaatattggacgcaggcgtgagtatggagatgacagctattcaatcacgaattgtcaagggtcctatatatcagttgccaccctgatgagtcgacaatcaacagtcacgtgtatctcaccttcggcaggtcgtgcgagtaaggacgccgcgacagacaagcagcccagaatactgagaattcgcatcatttaccgttggaccgttgataatcgaggcagaacgctcggaaagacaagcagagcccaggactgtccaaatgtgtgaggatcgttagcgagacagacatcgctcgttgttattcatcgccttccaccctggcctccacttgcactcgtccggcccggtcattgtgcttggcacaggtttttgattccgctggaccagaggcgacgtgtatcatgctgaatgaaatcatgatactcgatctagatcccattgcgacttgcacttgcaacagctgtgaggtatggaaaaggtacaaaacaggctacaggtgtagatctcatgggtaagccgatgatcatggtcggactaccttagacgacggcgacctgggcttgaacccgttgagacgcgtcctgtgggaaaggccacatgcaggttcttatcaggccatattcctaagacttgacttgtcgctatttgactgaccaggaccatatgatgactattggctgcttccctccgctttggattcggcttgttcatcaacggtttgtctttcattggcgaccttgaccacgatctctcgctcgtcaatcttgtatccctcgagtttctcgagcgcgagtttctgctgttcttggttgttggtctccacgaaaccaaaacccttggatcgaggggtaggagcagcagcggtctcgtcaccacccttcttgcggaaagcgggcttagtgatgacctttgcggatttgatgccgatgctcaattctttgaagatcccggccaactgcgcatcatcgaccgagaagggcaggttcgcaacgaacaccagctgaagatcaaccgacagatggcgtcagggtgagacgccatttcggacttgcaccatggatactcacggtggaagagggttgaccggtcgaagcgatacgcggttgtcgggatttgagcttgccttcgttaccagcctgttgtttctgttccgtagtggttccttcatcatcaatcctcgcagcctctgccgggccatcgttcaaaacttcgccgtcgatcttgggagctcggcccttcggctttctgttcctcttggctttcggtttcttggttgctgcgtcctcggcttgtgcctcgacagttgtctgttcagcgtcgtcgttgtcatcggttgggagacggcgcgcagcccgctgttcgatcgtgtatcagctcagccaacgccgaaataagcgaatgaagacataccttcttcctctggttcctcttcttcttggcaccttcagacttctctccattgccagatgcttcgatagtgacaccttcctcgtcctttgatacttccttattttcgtcagtcttgccacgacggttttcacctcgagggggcttgtcagaacgcgctttggcaatcgctacgtggatctccctttcctggagagctgtattgctactgtcagggacatctcaggcaatcgactcaatcaagacacacatttcttgtccaactgctgtacagcttcttctgcttcatcagtcgagctccacaccgcaaaggcgtaaccggccgcccgtccgttgctccgggttgccaactccaacgattcgctgtcgcaattcgctacatcagaccgcgatcatgacgaagaaggctttgtcgacttacagttttccaccggctccggcaacaaattctctgacttgctcctcggttgccgtataagcaaggttaccgataaagacctagatgatgatagcaatagagctcgattcagcaacgaagccggaagcgggcggatgttgtggagctaagggcatcaaggtgcccaaatacgaatatcacataccttacgaccgaccttgtcatcctcgaccctttgggcggtagacgaaacaggtgcagcttccgggatgctttgtgcggacatggttgatttgggttcgtgaggggtatatgacgtgttgtgatactgctgtagctatgccggtatacttggtttcgtagaaggtgtcttgaatctggttggttgccatataatccagcgtcgtgcgagagggcgggcgaatgattgaaaggccatcgcatcgtgattcatcatcgcccttcgatcgtgcccctcaccgctccagctctcggcttgcagcttgttgccaggcctcgcgagagcaagagtcatcgcgtcacgctccgtgagaaagcatccgcaccgaattgtacgatacgatacgtcatgaccggacaaaagcacgagccatcatagccataatgcggtatacaacggaaatccacattggcgggctgcattccagtcatgcctggtagggttgccccgcacacgaccgcgatgctacaggaccgcctagaaggcattggacgacgagagattcgagggatcgatctcgggatctgcaaacgcaagatgggtgtaagaaagtccgagtccgggaaagcgatcgttcttggactgtaacacgacttacggacgacataatgcacttgggcgtgttccgtagaagacgcttccatagtctcatcgccgatactgtctccaacagcccccctcagctccatgaggtatttgtctttgacaagcctagtcaaagctttgccaataatttcccgttcgtcgtctaggtcgtcgacgctcgttaattcgttctccttttgctcgagataccactctatcaattcttcacggtctaccccttggctggtagtcctctccacgtcgctcaggtgaagaacgctaaagacagtgtggtttcagtacaggagcacgtgggatcacagttagggtctgcactgaccataagttcatgatgtccatatatttgttgtctgtgcagcgtcggccagtaagagccattcccgattgtaaccgtcccagatgctgctcacatgtaattcgaagtttctttcgagctggtactggcgtactgctggggccatcgcttccgaagcgcctgtctcgctcagatgtcatcgctgctgtgctcgaatctccgttcaagagactggaagcgttataagaagcctcggcggcatcggcagcagcgatatctgccatatcaaagtctgaatcgcgatttgcgtcaggcgtggttccattggccccttctcctggagctggaagagtttcgtctgcgtcgtcctcgaaatcaatgtcatcctgttcgacgtggatgattgattggcgcagcagagcgtatgcctcgcgaaccatatttggcgtgatctgacaagatcaaagcgtttcagatcagtctcttcggcttgtgcgccgacggatatcaggccgtttggcttacatcgttctggcaattcgccctggcgatggcttcactcagtcgaatcatactttccagctgcctcacagtaattctatacgaattctggccggggccaccgccatcatcctgtcgtaaggaccgatacttatctacgagtacggccgatgcagctgatgtgagctatttgtcagatagatgattagcaatgcgaagatttgcgcgttcggctgagaagatgactcgccttgggtttgaacgtccgagcgtatcttatataccgctgcaaggcttccgtactgaattccggagtgatcgcatcgtcgcggaatctatgcacgttgacgatatgttgcgcgatattcatgtccacattttcgttgcattcgtcgagcacgacgaagaacagatcgaatctagacatgatcggcgcgctcatcgccacgtttgcacgcaagctcattttgcggttgtacctgcctcccactggattggcggccgcaagaattgatgtgcgggcgtttagcgtagcctggataccagccttcgctatagatatggtctgctgctccatcgcttcatggatggcgacctggtctccaatgtccatcttgtcgaactcatcgatggcacaaataccattgtcagcgagcatcaaagctcccgcctcgatggtgaattccccgctttcctcgtccttgacgacggccgctgtcaaacccgctgccgatgatgcctttccagaggtatagactgctcgcggtacgagaccacaaacgtacctgtgtgagaagaagatcaggacggttccaatacgacaccgagacattttgcttacttcagaaattgtgatttgctcgtgctgggatcacccacaatgcaaacgttgatatctcctcgtagatgaataccttcggacgtttgcttgtgcactccacccatcagctggagcaggatacccttcttgacaatttcgtgaccttgaacagtccgccgaaacgtccgtcagaaacggctgatcattagagacaaaatctcatatcactcaccataaacggtcggcgcaatgctcgacacgagacgttgataaatgtgatcggcattgaccatgttcttcagttcatcgacttcctgttgcgtaagcgagttcaagaaaccatcctgatcctcttcaccgttctccagatcccctcggagaccgcttgccccctatgtcaaacagacaacccgcccacgtccttgatcagttcaccgctgcacccgggcatgatacgtgatacacttacgcgcgcatccgcttgttgtaccatacatccgagaaacgcagtcttgtacatcaagtctcggacacccagagacttgagtcccgtcacaccttgattggcaaccccaccaacatcgcgaccagaccgtcccccttggttctgccgcatcatttcggcagtgactccaggcagacccagttgactgacgtccgggacaacgatgaacgcccccacgaagacgcatttatctccggctttggccttttcgacaatctctgaacgcaggatgacatccaacgagcgtggcattgagcctgtaggtatttcgtttgcattctcttggattcgcactttctgccagtcggaaaacttggactgctcgataagcaattgccacgagactcggtttgaacaggtggcattcggacacagattcggcttcagcgtgaacatttcgggtgagcaaagaattcagaattgtttgccactaaaatcgcgcacctcggtgaatttaaattgctgttccacatcacttatgatggtcttgcaaacttcgcaccgaaaagtgccggcaactagctccggtcgcacttcgcttgtccgggtgacggtaccgcttatgctcatgagctgcccaattttgtccattttgagatctcgaatggagttgaccaagggcatattgtagaacgcgatattgaagtcgcgagtgacgagggctgggttggaactggaaccgggggcactgcggcttgccgcggtcgcattggcagacgtcgagatgtagagataggtgggtgcatatcgccggaccaatgcttgaatcgccctgcgaagatagggcaggaaactggcagagacagaatcatgaggaaagggggttgggagtacctcgaatccgactttgactaaccgatagtattgacttcgaatggctctcgcaagcacttcttcacgttccagtaaatggagcatgtcaacatagagggtagtgagctcgtaatccttcattgccttgatctgttccacataatatcgagactcttcgtgattggtattagaagcgggaacagacccaggggtcggcgttggattggcaagactaatcgtctcggtaaagctgtacagggcgacgaggctcgtcagagctgcgagaaccaaggtactatgtgtcatctggctaacttacctctcgaggaaacccgcaaatcgctccatgaccttttcgcctgttgtgtccttgacccttggcacgttgtcgagatcatctctcaatctcctccttgcacctcgcctagctgtgccctcctcttccgcctcatcatcccgaggcgcagtgatcctgactccaggaagcactccagaagatgtgttaccaatttgattgcttgtgaatccgagtggatccaagatggccaagttgttgccgcggatgagcgggagcgagttgccctcatcatctgcgggcgaagtcggatggggtgccgatgaaggcggaagaggaaatggtgatgacatgaaggttggagtagagtttcagggagttgcctcgatagcaagtgaggccacctatgtagctgtgtctgtgcaggggattcaacttctatggcgtagcttgtaagaatatatgatggcgatcgatttgttgacgaagaggagaccgaccactgccacttctcactcgctcggctcacgcgctgtaattaagagcgcgtttgagagcaaagggccatcaagcagcaagcagcgacaaggcggagggagggaaggggggagccacgcgttttgataaaccagagcacatcaagcgatgaggacatccgcggtgtagactacggcatgctccggtcgacgatttggatccgaatctggccagcgtcaatgcacgatgatgatgaatcccagaggagagctggtgaagggggggagagggggaacaccgcgcatcaagacggtacttggcaagatcgccagatccagactgaggacatataggacatacaatcatatgcgaagcaccggaggtaccacgcactgtataccctatatctctaagcctgacccattcgactcacataatctgccggatacttcatcatgtcgagtgcttcaggaattcgggtttcacctgacgtgattgaagcttggaccaacgcttgcaagccggaggtcgccgatgtaagagcattagtgcttcatatcgagcaaggtgggttctatgtggctggttatcaatcttacagtatgcgttgaatctttctgatgggtcaactgccaacagatgcgttcgtgctcaaggcgactgtgcctctatccaaatcgttcactgaggacatttctactctacccaaggatgctaaaacgtgtgcgacctatgtttaccggacggatgacaaggctggatcaagcggatggaaatgggtactcattacgttcgttccggatcatgcaccagtgagtcgatcatatgtccaactagggttggcaaatgctcaatggtgacaagtcttgacccgaactttgttcatcgtcactcgataggtcagggcaaaaatgctacacgcttctagtaagggaggtttactcaaatcactaggagaaggccgtttcaagcagaacatgtttttcacatcacaggtcagtcggtcgtttcatgagacagaatcgatgagaggctcgtcagccctccgttcagcggccgccatgatcgaaatccactgatcccaggctttctaacaggacgacctgacgccgaatgcgtttgcgtctcatttggaccatctggatgctccacctccccttagcgccacagagcaagctcttgcgcagatcaaagtctctgaagcagaagaagcctctgcccgcgttgctcgcctattcggtgggaacacctcttcgcaagacacgccaacttctcccggagttggcgtctggagtggcaaattgagcattgccggaggtaaaaccgaaggctcagctccgaccggacctgctaaggggaacctcaaatggggacctggcgttgaagaggctcttcgcaaattgaagggaggcggtgccgagggactgggcgtgtttttggtgaggcaaacatcgaagcgaatccagtaaggttgagctcatactcatctactggagcgccacagcatgtggatccaaagagcgaatccgtcgtgctcgcttcgtcggaatccgctcagcccgtgaaggtgtccccaagtggtttagcgaaaaagcttccctcgaaggagccttgctataccttttactcgtggcccaaagctgcctcgacatcgtccgagctatccgaaagtcctcattcgaagtctgcacaaacttttgaacaattgccaaagcctgccgcatcggtcgaggacgaggtagccaagcccgacatcgtggtgtctgaacccgaatcatcgcaagccagcaaaatcgcctgcatatacacctgtccggcagcaagccctgttcgctaccgcatgctctacagctgcagcctacgaggactgatccgagacgcactggacatcgttggactgtcagttgatcagaaggtatattgatcagctcgtcaaacacaagagcgttacgagtgaagttgatttggtcgctctttaaaaaacaaaaacagttggagacgtccgacgtcgaagagattaccgagtcgtatatcaaggctgaattgttcccttcggcgtcgcggtcgtctgggggtcccgcttacaagctacctaccaaatcagcttcaaccgatagcgccccaaccacaggtcgaacaccattgaggcagcccatcagagccgctacggcgatctcgcaatcccgatcagcagatgggtcacccgtggtaagcccctcttccgcctcgcagctcccttcgcctagcgagccagaacgagcgaacagcggaggaggtctgcccgactccgcgttctcgatgtttggccctcgtgtacaagtcggaagccctggaaccggaggtttcacccggcctcgaccggccgggaggcgttgatcggtcgtcagtttgtgcgagctcaccctgtacggtgtagactggagctgatcattgttcactcgctttctgctggcggatacctgatcgatatgcctgtctttgcttcatgtgatgccacacctcagctagactgatcaccgatcactgaagatacctgtgtagcacggcgataataaaatgtaactataaggcgatgtaattcatatgctcgacctcgtgctgtaggccgcaaacgcgcgaaccaaagcttccgaggtcaccctcgagggcgggacggcagcaggatccaccacgagggaacggacggccggtccctagcacgcgcagcgcggggtgtaaggcaagttgcgttgtatccgggcgactcacgacggtcagtgtgtgtgtgggtgtgtgatggtcctgatgcgtgttgggtgttgcttgggagcgatggagcacaactcagggctgcaagaatccctgaatacgatcggatcgctgtggcttgggctgaaggagagctcatctgagctgcatcaatcgattgtcttcgcaggtggaagaatacggatagtagtgttgaaagaaccatcccaactgtgacgcaggacacagacggccggcaaagacaagaagtaccgaaagaggcctgcctacaatctacggatacccatatttgttgccaacacgagcacaagcctacacgacagccgggattcaggaacagcgtcacctgcataaacttggtgcatttccctgccaaaaatcccagtccctcacgcaaatagccaacaagcctgcagttgcgatcgtcaagtcgccgtcagctggtcatttctgtgatctgtgatctgtgacctgtggacgctccactcgcgatcaaagtgtgtcgacgatcccttttctgtcaatcaagtgctcgatccgcaaattcttgtccggaaagccaaagcgataccgtctcgtcttgctggatcggagcatgatcaagactatcgtatagacatcacggcgggtcttttgaaaacatggcaattcccattgaacacagcgctaccacaaagcatcctgcagcgcaatcggaactacaatctgctgctcattcgaacccagataaatcgggaggttctcagaggtggagaaagatattcaagcgcgcagtcagtgaaggaccacatgcgaagctggagataatcactttattgatgccatccaacggtttctcgcagatcacttcttccggcgacgaaagacgatcagcgaacggcgccagccaccagaacggtaacgcatcgtcttcagatacacacatcggcaatctatccctctcgagtcatagcatcggagggacagcaggagacggctctctctcttccatccaccttccccttacccccaatcaagtttctggatcgcgtgattacgctctagaggatccgtattccatctccacagagcgatcttctgcctcttcgggcatacctttaggatcccctctgccgcagacagccaagagccgttatttccccttcgcgtcatcatcgggcagcggtcccgtagaatccgcctccaattctcgcaaaccgaacgagaaaaaggacaaatatcgcacgctaggaaaaaaagcggctggttctgcgagagaaaacaaagcgttttactcggtctcttccacgcacggcgtgcgggacaaaacgttggctgtcacgaacgaggtcgacaccgagaaaccaagtagcgccactcagagattcattcgcagagttgcctctgctcccaacgccaagggtctattctcttccggatccatgttcaataagggatcaatcgaaccgcctttgccttccaagatgaccggcttgggtttgccggtccagaatacccctcatctcgggggggcaccatcaccgccgatgttgggactctcgaatgtagacatcacggtcattcaagggggttaccattctccttcgtcaatcgtggaaggctctatcagcgaacatgcggtttcggagtcgtcgggcgctctctcagcgagacatcccatgtcaaggctattgagcgggacatctaaccttacacctggtgcctcgacagcgtcattggtttcgacgtctactagcacttatagtgccgcccagtcgggtactcgtgagcatcgtgctcaatctgtgggcacgaccgggaaatccgccctctcccccggcatggcgagattaggagcagctcccgggccaggatttaggcgcacctacagttcgaattcgatcaaaagcaagactgtgagctgggcattcagcactatagggagacggggtggaccgttgaccgtcatttcgatcacaggtggaggttggaccgggctctttccaaaaggttcgcttattgggcaaaggagatgtcggcaaggtgtatcttgtccgcgagaagaagtccgacaagctgtttgccatgaaaggtaaaaaagaatcgctccttgtcccaatttcatctttgacgagttgccgtctgtcagttttatcgaaaaaggagatggtcaagcgaaataagatcaagagagctctggctgaacaagtgagttgaggtcgccatttgcgtacatatcttgtgctgagcatatttgctgtacgtaggaaatcctcgccacgtcgaatcaccccttcatagtaacgatgtttcattcattccaatccgacgactacctctattttgtgcttgattactgcatgggaggcgaatttttccgagcgctacagacccggccaggcaagtgtctttccgaggagcacgctcgattctatgcggcggaggtagtagcggcactggaatacctgcatttgatgggctacatctatagagacctcaaaccagaaagtcagtttttagctatcgccatatagcctcgaacaaatgctgatgcttgccattccgcgcctgacgcccagatatcttgctgcaccaatcggggcatatcatgctgtctgactttgacctgtccaagtcgggctccgagccaggtggagctcctgcgggaatgaagcaaagcgcacagaatggcgtaagttagtgaacacagcgagtgttgagcacggctaaactttctgcaaaaggtcttgatggtggacacacggtcatgcatcgcagactttcgcaccaattctttcgttggtacagaaggtgtgctgtcgcctcacaaaaggaatcttgcaatcccggcctctgctgatgatgaagcttcgatctagaatatatcgcaccagaggttatcaaaggcaacggacacacatcggctgtggattggtggaccctcggtattttgatctatgaaatgattgtgcgcaccgttaaagggccatgaacgatacttaatgctgatgtctccatgatagtttgcgacaactcccttcaaaggcgtcaatcgggtagccacctttgcaaacgtgctcaaacacgacgtaacgtttccagcatcaccaaacgtgaccaggtaagcaaactctgagcttgcgaatcttcctacagctaagccacatacttctcatcagtctgtgtaaatctgctatacggaaattgctgatcaaggacgagcacaagaggttgggcagtaacgcgggagcatccgagatcaaattgcacaagtggttcgctccgatcaattggggtcttttgcgcaacgagaaaccgcctgtaagtgtcatcgatcccgcccttgaaacagtgcgctgaggctcatgctctttcggcagatcgttcctgccgagagcaacggcgtagacgcaatcaatttccgcacgatgcgggacagcaaaagcctggactttgatacgcatggagtgagtttcagtcgctctgaagctgtgtagtataacagcttacaagatattgatccgatgctgcaggatatcatacacgcacacgcaggcaatccgtcggcacaggagccttcgactcctggtatatccaccccaaaggagctagtcggcgaattcaagtcgacatctgacagcctcgacaaggaagtgaacccttttgtggaattcagcagcgtcacacgacatttctcttgaaggatatagtcagtcttatcaatcatgtgcgatgttttctgcctctgtcctgcgcttgggaaggtgggctacctgtaacccaaagggaagcgtctccttgcctattacaactacacctaatgcagtctctgtatgacggtatctccgctttgaaatcgaagcggaatgccaacagtcggaggactgcttgctatgcaccctttacgaaagcctcgtaaaccaaggtctgtcaaatccaaatgataatatgacctggtcggcaagaataggacatccctcacgcctttagtactttgacggagaatgtcggacgttatgtatatcggggcggatgaagcgccctacatgatttgcatgaccagcgtcagcctaggcgtttcaactatgccctatgtgcgggctggatagcaacaccgaacaccgttgcattcttaggcggtcttcttgtcaggcggtatgtctgtcaaggagatgtccgcttcgctggtattcgtgacagccgctgtatcgtgttttttcttgtcgatgctagccaactccttagccattagcctgaagagttcttgctcgtctacggcaacttgcatgccagcttctttccagagctctccattgtcgtcaaccatcgcaaagactcgcttcaggtgttcattttctggcgccgcctgcatgtaacgttcgtatactgcagctgtctccttatcggcattgtctgacagtaggcatatgactgctcattccgcgttcgaacaggaatcttcagtttatgtcaagggcctgatggcaggatcgactgaccttcagctttattcgaatcacttagcatccactgtagcagttcccatgtataggtgccgccctgtgaattggtgagctcaaacaccaccgcctggcccatccgttcttggcttgtagaggcaattatgcctcgagccgatttcttcacagcgataatgcctgagtgaagattgtatcagctaccatcgcgatcaccgcggtaactcggtcctcgtatcggtataacttacctactcggccctggatgaatttctgatcgaggtctttcgcaagcacaactccagcagggggcatcgcgaacgagcgacatcctggcccaattaatcttgacatagattgactagacaatgcttctgcgatctatcgaacaaggcagatcgacgttatggcttggtctgagagtcccgaggtggctcaagctggtgcttaccttgccgtctgtgtcttggccttggaaatcgttcaaagccacgatgatcggtaccttgagctcgatgcatgcaaggatggtatcgatgccattggtgccgtccccttcgatcgagacaacataaggaagcctctctttaatcgtctttacgatagtggtagattgcatcaagaggagtgatttagcgctaggcgaaactctcactcacatctatggccacttgtggctcgctcagaggaatatagtgttcttcactactctgtatcacgaaacagtcagctgccaaagttgatattgtaacgctttattcacctacgactggctcgtccccgactcgcaatagcttcacgccctgaccaatgttgagctgcttgagtgttgctgcaaaacggttcgcagtgtggtctccgtacagccgcaagtgatgcgacactgctaagtgtcttggtatgactctgggattgcgtcgacagaggacatggcgcagcggagctaagcggttgcagtaatacacgttggccctcacgaattgacacggtcgcggaggtacgaaccattcggtatgaccttgagcatgattgtcttggactccttcacgtctgtagcaaattgatgaaatctgtgcaggaccacacctcaataaaaaggatgacggtaaataacgaagcaaagactacaggatcctggtgaggtgcaggtccttgatcggctgaggcgatgtcgcgtgacgtcatcctgtaaagccctattgatcaggcatttcatgtagtacaacgctagtttcatcaatcattattacacggcgaaaacgccatcccttgctaaaaagtcgaccggtccaccagccgccactttcggatccatcccctgacgccgccctcgtccttgtctgtggtctgaaccagtgcgtgtggcggcgagtttggtcggggcgaagcggagcgctggacggctcgatgggacgttccagcctctagatcactgccgggtgaaagtacatcctcgtcctcctcgtccgggtcatccgcatccgtctcagccgtatgtccgtctcgggcgactcgattggcggcgctcagcctgcgctcgctgtcttcagcttcacgaatgccgaaactgcccaatccccaaccttcgcttgcggccgcattttgcccttcgaaaacctgctgtcgaagcttggctctacgcagaacctttctctttgtggcttcttcatgtccggaccggaggttgcgaacatatcgcaagatcatgttgataggataagcaaatataccagagacggattccaaaggcaatggcgatgcatccgaagaagaggacgatccacctgcggtattgggagcgcggttcctgggcggttctgcgttatccatctcgcgaagttctatatcttcagcgccggaagtgttgtccggagcctcggtctccctgtggcgaacccgatgtcggtcggaacgcgatctgtttgagtccagcgcggaagtcacacctgttggtccgtcgtctccgcttatattaagtgtttcgaggcgtcttcgctcctcacgacggcgttgtattcgctgcttcttcttttgctccttctggaccatgtcctacatggtgtattgaggcgatcaggccacaggccctctgtccgctactgtttcgcagactggacgtacctcgacttcacccacacccataccgctcccgacccaccaccaaaagcccaaccagctctgccataagactatagcccacagcagattttgtagccaattgatcgtgtcttctttgacctcgacaaagtttatggcagtgctgatgatggcgaggatagtcgcgccggctccgaaagctgccgttccgccatcgaatcgccaagcccttttccggttgacgagtaagccccagatgaccaacgaaacgctgaagatcagcaaaagtgtgccgtcaaagacgttcctgattgcatcgcccaagtcgattgtagttcgcctctccgacaaggaggaaaaggtcaatccagaagcggcgagtgccagtgggcctgtgtgacgggtgagtaaccggggaggggggaaatgaacacgaccgagagagctttacctagtaagaggaagataagtttgacctcggtggccgaaggaaagagtaacgtcagaaattggatgtgagttagctgtatgcgcaatcgagtcagccacaacgtcagatatcacaagatcagagcaaaacgtgtccactaacgtgcaccatgccattgcacaacgattgcaagaagaaccacgcccccttttgctgcttgctccacgttgaaggcggggtattgacgctaatgtaatcgagcatatagggccaatgggtagatgaccgctcttgcgcagccatgacgacaacgatactcccgatgatgctaccaagaaccagtaggatgccggacaactggaggaggtagttgaacttggatagaggaaagtggtattgcatcgtgaagaggatatgtatcaaaaggacggcgagcagcgtcagggtgatgccttggataagaacctggactggtagggaataggtgaaggagggtcggtaggcaagatatggatccttgccgctggtttgcgcagctgaagattcgagccgggcttgcaaaggcatatgctgcggttttgagtgctagtggcaagctttcagcgctgttttgggagacagaggagcaacgaaattcggtacctacacgatggtgtacaattcgatcgatgccgtcactttccgctaggaatggacgatcttgtccgtatgcccatctaacaagacagaggccgccggctatgaggacggcacaagcaaggccaatgaatatgcccttcaacagggttgcccggtctcgtctcttgcttgtctccatggacttggacccgccctgcgaaaagccggttgcccatacttcggtagttgatctagccttgcccagagatggtaaatgcggtatggcttcccctctacccgtatagcgatggtgctgtgtcatgttgaccggtacagctagccaagacgatagccttcctatctaacgccaacctccgtggcgatggtaatttcgagagccttttaccacctagatgtccaaatagtggtgtacggttgctttcggagatcctggtggcatatcgtgtcgaccagaggtgatttctatggtgtcgctttgcttggggactgagagtgggatcgagactgtctacccagtctctgtctctgtctctgtctctgtcacagatggaacagccagggaatctcgagaaaaagtcttgttgaacaggtgcttgggctagcgtatctacgggtgcgtgtgatccgaccgaacgattctgcaaggatgtataggaagcatagagtagtatttcgaaagggttggagttagggatcaatcgtcggttttcgccgccgcgtcccgctcgggcccagttcagctagttggtgccgaggcccaaagcgttaactggaagatgacaccggtacggtagcaagtataggcgtgatgatcggctgacacgagcatataaaggttatacaacagagctctcgtaaagcgcacaaagggaaacacggtgcaggaaagggttacaggcgtcattagcgtcgttgagagagattccggaacaaatttggcgagggcgagtctggtgaacgtaagagaagagagagcgatcgcgaggcggtcgacgagcgtgatatgggtccatttcgatgcttgttaggttgtcgatatggcttggtcggatcggctgttgactgcaaagggcgtagctgtctgtatacctatatcaggacgacttgtattctttggttgcaaagcgacaaataagctcaccatcagagtcgatcgagatcagctcatcccggcccaccgggcaacttccaccttctcttcgacagctccgcacctccgtaccccaaaacgaagacgaggaacacggcgacagcagcggcgacgccgagagtactccagaaccgcttgcgatgatcttcttgaacagtgtcgccttccctttccctcgccaacaagggctcagcctgacctgcttcgatctcggcgggatcaggctccgtgcgcctcaggatcgattcgggcatgacggtaaggacggagcgaagtcgtcaaagctgagtgatcgaggcaattggatattgggcgtcaaagaatgagatgtagcgagttcttgagctagacgacgttcaggtgttccctttcatgacagcgacaaaagcagccgatgcaagcttgcaagtccttcacatgctctactgtgccagataatggccgatgggcggggtgatgacgggagcgagcgcgaggacgccgcccgatcgatatgcacgcgcgtcgcggcgacgatcgattgaacggattggcagattgaaccttcagtagctcagtagaataataatgtcgttaattctgcatgtttctgtgtgtggcataaaaacatgccgaatggcagctaggatgtgtacatctaagtaactatagacctcatcattaaaacactctcaggccgctgagagacacgtcggcagcctgttcgtggctcgcgccaggtaagacacccatgaccaagccgtcttcacgttctgcaccagcaccttcgattccagccccgccaagaagactagagaaaagctcgtccacttgctcctgatgccacccgttggaaagagggataggaacgacaaagttttgggccttctcgtgaacagtatacctgcgatcgagttggatcgcaatgtcagccatcattccgtgaatctggacggagcgcgagacttgcctgatcttccttcccttgctagcgccccgctcagcatctcgacgcttctttttctcgctctgcactgcagacacaccggctccttttgaaagtccgaaaccgggtttcagcgatggcattctccttgtctaccctgatccatcggaatcggacccacctgcagctgatcccgagcgagactcgataacttccctcaaaagggccttgtatgccggatcctcgtcctgccatacgtcagtacctcgatcctaaacggcgagatcggttagttggcgaatgtctgtagctatgctagcgtatacactaactctgcttgctaagccattttcaatggcttcaactacgccgacttgcactgtgctggtgaatttggtattggctttgccgagattggcctgttgagccgcagcggcttggatcttggtcgaccatttatcaagggtgcttgacagtgcatcgtgcgatctacccgtggacaaccaccgacgatcttcaatctctgattcacgttccatcgttttcatcggctcccatactcaccgatccagcaagctgaaagattccgccgctacgcgttgccaatatgcactctgcgtccactcatcatccaccggccgattggaggtcttgcgtcgtttttctgggaccagactgacgatctgcaagcatggacataaaataattacgtttgttagcttgcgttcgaacaagattcgtctgaacacgccatgacgtacttctctcagtctcaggagtcgttcggacagctggccaagtgaccgcagacattccgagcatttggctcgggtgtcatcgctttccatctgttcggtggtcaggcacatgcttagcaacggagttgaacaagcccagcacctctcccacgcaccgcttctgcctttcgtttccgctgcggtagcttagacccagaagcccatgctttttgcaaagttattcgagcagtaagtagctcatcgaaagttttctaggcacaaagggtgattgtgaatcaaaggccgtatttcgaggagaggtcgactggtctcacctgttgttttcgtatggcgagtcccttgtcgacgtccttccttttcgaatcctgtaaagccgccagagggtctagagccttgtgaggagcagcagtgttgggcgttgtcactggttcggctctacgagcgatcttggctgatgtatcgtcaaactccgtagcagagtcttcgtcctcctcctcgtcatcgtcgtcattgaatgccgccgcatcttcaaagccatcgtcatcgtcttcatcctcatcttcatcctcatctgcaaaactctcttcgcctccgctggattcgcccaagtagtcgaactcccctcggactggcgctactgcgtcaatatcttcctcatcgctcggatcatcatcaaagatcttgacacgcttgggcttgctggagctggagcttccgtacttgtcgcctagctccgcaaaggtagtggcagctgtgtctcgcagacgagaagttctattgatggtggcatcagatgtagttcctgtgcagtgatgcgagcgttttcgtggacatacccggaaaccgcatagtgactacgacccgtggagctatcctcgccatccggacggaaggtggacagagaggaatacgcattttctgggtcgatctcagctgtacaggccagtagcgttcagccgcggggatttcactcgaacgccgtataagcaagaacatacctgaaggaacggtcttctcatgtagctccttcaattgctgggccagcgtttgtcggcctgtcgttgcgtgtaagctcggaagaaagctcagtcaaacccacacggcagcttaccggaagacatattcgagggcgggcgaacagcagaatataagaggctgagcttcttagacgccagctggagagtgtcgactcagatatcgttggaagaggacttttgctgctccctgtcacatgagaggatggtttgacgcagggggcaacggaaattagacaattaacttggaagctgatcgtgaccgagatttcaagggcggaagcagattttcgcgagttctttgaccttgatgggctcttggccgtacgtagaagtcagccaggtcaaagtgaactgactggatggcgaatttcaagtcccacgaagcatgaaacgagaagaggttatgtgttgagcaccgttatgatccggtacatcacgcatcagaaacactgggcgaaatgaataggtcgtcatacaagagagaggcaaagatgtacatgaaaagcggtcctcgcaaagacagtcacgcaatagggcctatgcttctgcctctagctctagaacatagtatcctgcagaacaatggaaagcgatcagcacgtgtggtaggtgaggctaggaaaccgcaaccggaactcacttcgtctcgtaaatactccccgacatcgctgattacaaaagtcagatcaagtaccaaagcagttagtctccgtggcacggggggaaatcgcttggtactcacgcctggtggaagacgatgataccagtagggtcgagctttcgcgtatctatcgttgaccgggcagtcacaccgaatccctacatcgtgcggtgggtatggtgagtcccgtgtactccacacgcgatcgtactaaacatgaccaccgacttaccaatggcgtgtccgacatgctaaagactactaccccctgatgctctggggtatcctctgtgatccttcccaggtgtgctttcaccacgtggtttccgtacaagaacggcagttcaccggcaggcttgatccagacctacgtattggtcgagcgcgggtcagtctcaacatcttatgggtccccaaattgtacactagaaagactgaagactgaccttgtacttggcgtactgagccaggtaatccagactcccgacctgcagcttgaactttccggtcttactgaactttccaaagcatgttccgagcgaaatgagattcggtcgcgagatggataccgcgaggtgcatcgttttgacgggaaggtaataaactctgcgaagacaagcgaaaagggcaagtataggcaggcgtgagtcaaaggctaaacaagcctgaagatggatcgatcttcgtaccggtccttgtgcagtcggaaacagaacgcatcctcgtcaggtcggtcgataagatgcacaaggttcttgccctgcgatattaaagcactggtaagcaaaataacagtagcagagggtgctaacatgctcgacatacgatgtaattggccagctctgtgcgtagagagacgaatcacactcgacttcagctagcgtcactacggcagcccttgtcatggcggcttactctcgaacacggccttggtctcttcttcggtcaaaggtctcattttcggtcagatgatgctatcggattgtttcgttctcgatttcaagacgattatcagggttggacagagcagtgatcttgatcacttcaagtcttcgaaatatctagacaggcatgagcccagacccgcggaattcttttgcatccgatgacccaggcctctagcttccttacgtaaacatcatctctcccctactttcccagctttggcctttccgctgacgagtcgctgcaaccatcatcatcgtcgtactcatcatgatcatcaccaaggtcaagtcgaggctggtcgacatcgacatccctttaacacttgctccctcatcgcacctcatcttcaatatcacgatcgattcatcatggtcagtacgttctactttgcccttaggctggcaaggatcttacacaagctgtaattcatagttccgaaactcctacgactcggataacaccacattcgtgagtcctgctgcttgttaggctcctcttgttcatggcgttacggatggctgagttcatgcgacgtccgatagagccctcaagggcgtctgcatcaggtgaggacagacccaaacatctgggaggtacgcaggtcgatgttgatcctagctgactcctcgttccaaaggtcgaatatgctcaggaggcagtcaagcagggatcggcagcggtaggacttcgttccaagacccacgctatcctcttgacccttaaggtgggtcacgaactccatctgctggctagatcatcgttctgatcgccggtgagccgctacatttgctctacgatagcgatccactggagagttggcctcgtaccaaaagaagatgatccgaatcgacgaccacgtcggagtggcgattgctgggcttaccagtgatgctcgtgttttgaggtaggcctcgattcccaagacaggtgggatatgggtcaggtttctgaaatcatcttctcgttatagcaactttatgaggcagaaggccatgcagtcgagaatgctctacgcccgaccaattccggttggacggatcgtgcagagcatcgcagaccgagcgcaaacgaacacccagtactacggaaagaggccttacggtgttggtttcctggtagtcggagaggatgtaagtccggctcattcgtgaagtcaatccggattgtcgctaatgtcaatcgctctttgcgtaggaaaccggaccccatctctttgaattctcgcctactggtgtattctacgagtaccacgcgcattcgatcggagcaaggagtcagagcgccaagacctatctcgaggaccattacgccgagttcgaagactgtaagcggtctttcataaactcatttctctgcatgatatcctcctgacgactactgtcttcgattgcgtacctacaggctctttggaggatctgattcagcacggcttgaacgcgctccgagatacgttgcagcaggataaggctctcactcaacagaacacctccatcggaatcgttgggcctacggcgagcggcaagaaggccactttcaggactctggatgatgaggccgtcgagccgtatttggctgagatgagaaccaggcagggcgtgagggccgaggcggatacaggtgctggtgacgacaacgacgacagcggagcagccggaggtgccgccatggccgtcgagggtgatgccgcgccggtcgctacccctgcggctgaggctagtggtgcgaacgctcccgctgccaacgatggagacggcgacgtgcaaatgcaaggttgaagtagaaaaccgtcggactgattctatgtgctatgttctgcgacacgacatgacgattattgaatttgcaaatgtaatacattcttctagttgaggcacagtgccacaagctcagagccaattcgattgacccccctgacgcgctgtcaagggcgcccagtatgtgacctgggcctggtctctagcgatgagaaaggctacgatcgaaaagatgggtgcgcttagacggaagaaagagagctcgggcgactctttcaattgcaatccagcgatcagaggcaaagcgaccagactgcatgtagaagcttggtgatcagtcatctgatgcttctcgagatcggaagcctctaccgacttacatcatgctgacatgatacacgtggtgttcccatgaacgcggaagctgcgtactgaggctgaagacgcacagtactgctggtgcgatagccaactaggattgagaggaatgctttaacggctggactcggtaagcgttgagattcgctcggtgctaacttaccccggttgaaagggcgatgtcacagatgagcaggtcgaaattggagagaagcgcttctggtatctgtcgttgggcatagaaaagataagtgaagcgttcgcgggatatacgtacacgggtacactgaccgaactgaaaccaagctttgaatagtgcagtaaagctggtacgccgaggatagctcggagcaagccgatggcagtcaggatcttcctgcccgaggtcgctcttttgcgcagaatgtcggcagcggatgcaggccacgtcccttcctccgagtcgtccagcaagcttcccgtggggctgtttgaatcgtcgccgtcgctgagccagtatcccagctcgggcgtctgctgaccctcccatgtaggtgtgccggcctccgattgaacgtcgtcccgatcggacacgcacgaagccccagcgctaaatgatctttgttgacagagtggaggggttcgccagccgtaggatccggacgacctcggctgcttctcgctgaaagcaaccttatgacttccatggctgagtgacctcttcaagatcggctgaaacgggaagcttcccggcagaagctttttggacgtttcaggcgattgagggtagtcggacgatgctgtggtatagtcgaaggggtatttggaagacgccttgcgaacccgttgagcggtccagaaggaaaagatggcgacgagtatgacatagagcaagatggtcacatgcgagagcacggagatgacctgagatattacggaaggcatggctgatgttaaattcggaagggttattgagttgtttggcaagacggggtatgccagtatctatcccttgtgctcgaaccgatatatgtaccctggggaaccctggcatccgcagacagcttgtttgattccatgactagcatgactacgtacaacattctatgtggtcagggccgggcatcagacaacatgatgccaccacaaatgcttcgctctctttcagcgtccggacagagaaagtttacgtttgccttgcagttggcgagtcttcacaagcccagacgagcgccctggtgctgcatttggctggcggagacgaaacgtatcacctaatatcctgatgccctgcacgctttcggctcctgactcgaaccgaggcgttctgctgatctgctgtgcgtcacgcatcggaaacaagaaccaaatttgaattctacaggaatcaccagaagggaatcgatcgtggcgcagagaaccgtcgggctcaaaaccttgttgatcgtcgactcaggtacgccctgaactggctttgcatggctgagtccaactcgcgacgttacgcggaaccacccacaacgctccaagtcgcgacgccggcaccggctgctttcaaccgtcgaatacgcgcgagtgtttttttctattctttccgctgcattcggtcgcttttcacgagtctgaactaccgctaccgtaccggcttcgtccattcgttccatcggacgagccacgcgattatcgacattcaagtttcaacattccatcgtcatacggtcatggatcatgcatgcatgcatgcacggccatgacaatgcgctctgcatgtgcacagtgactagtagtagtgggagtggaccatgtcgcagatcaaagtcagcagcttagtcggtcgaaatcggattcttcatggtatgggaagcgtgggtgtaaagaaaaagataaagatgtcaggctcaagatcgccggccgatccagaaggcaagttcagcttcggatcggccatcgtgaccggtcggtcatatccaaccggtgtatgctcacatctgttcgacatacaaaacggtagtcggacttcagctgctgattgcccaccaagtgcataccgcacaacccgtgacgtgaccttgctgattcagcgcaagcgattcgtacaccccgtccttctggcccatacgagcgagtcaacgtacgccaggtcggcgttggggccgactactctagaaagtgtggtgcgcgatgcggcgcatcttccgctcagcccgatgatctcccgagcgccgagagaaattcctgctaaattctatataccccaggctctagatcagcgctgtccgaccgcatcttggtcgaagcaaacctggaccacgtaccagtttaccagaatttatgttcgcatatctgaacagctggacataataatatagtgaactcgcacgctcgatacaccagcacggtcgcagactagcccgactatatagctctcaccaggctaacaggattagcaaaatagacatggacaccgtcagccaactcaaagcggatgtcattgtcgtgaaccaggtcacacaacaagaggagggagaccaccacgacgaaaagtataacgacgagaaacagtctgatgctacgcccccagccgaatcgccctcaaacggtggagacgactcggcctcgatcgtccggaagctgacttcgaagcaggaattgatcgtcttttctgcatgttgtatctcgctctttcgtaaggatctccctgacaacttatcaagatgccggcccgacactgacggtcatccgtgggggtcaacttgtgttactgcagaggccgggtggaacgatgccagttccggaccgctgttgccgagtctccaagccaagtatgagatccgatatctcctcagtcagtatatctctggtcgtatagcagcattgttcatgtcgctaaagtcaattctcgaccgcagtgagtatcatctttccggtacaatgcgctgggttcgtgctgggggctatgtcgaacgtgtggttgacggaccggttcggcttgggctgggtaagtcgccaccctgacgtgacgaggcgatgggttcagtcctgatctccggcccacttacacatacatacacacaggtggtcttgatcggaggatgcttccaaacgttatcctttgctttgaactgctggttcccaccataccccctatttgtggtcgccatgttcttcaacggagtcggtacgagtctacaagtgagccgaagggaaggattgactcattctcatcggccttgtctgatcgatcgcatgaaacaggacgcccaagccaacagcttgaccaaccgtttccgtcgtcccgatatcaaaatggccctcattcatgcattttacggtcagtccccaagcatgggagagccgcaatgccatgaacactcacgccgggctcgactctcacacaggtctcggagctacatgcagccccttcgtttcaactctatttgtggagcactaccccaatcgtttctatttctactacatcgtttctctcgctctgacgatcgtcaacaacgtctggtgtgtgctggtttaccgattccgcacggcggatgaggtgctcggccccgaacccgtcgagcaggtcaagaacgagagtggcgaatacgaggctttggccgagcagactagtggagagaagatgaagcgaatcatgaagctgccgcgcacctgggctattgcatgccacttgttggcctatgtcggattagaagtgacgattggtgagtgtcaggccattttgctatgatccattcggtctgttgaacgttttgtattctcctatcgcgttacaggcggttggattgtcagtagatcaggcgatagagacagctttcggggggagtctaacgtccctttatcatctgaaggtgtcatatctgagagacgtacgtggaggtggagtcgactctggatacgtcgctactggtttctggggaggtaagtgacattctgaatttggagaagattggtcgctgaccgtctttatggggatacaggtttgactgtcggacgagtcatctttgtaccattgaaccgaaaggtcagcctgcattctcaagcggattgcattagtcaaatagcttttactgacgcattgccatatagctcggagaaggcacggcgggttacatttagtgagctttcagccttcgaggctgtacatctgcacgctgttgctcactctcggcctttaattacagcttgagttgtgccgtcggtctgcacttcgtagtgtggtttgtgcctagcgtcgtcggcaacgctgtcgcagtcagcattatcggagtattgctcgtacgtgaatacgcgtcatttcagacgtaaaggcgctatactcacgtccgcttctgcagggtccgatctaccccatcgtaatggtcagtccttcttcccttctcgcgttcacgggcatgaaaatactaaatttgcctcgttatagaacgcttgcgcaaagatctttgcgactggtatcgttactggtgccatcggatttgttgcgaggtgggtttaatgttgagtgaatgcacgaaatcacccactgactagaccatcatgtattatctctcagtttcggcgctggtaggcaacattgtccacgcattgtccctcacaaacctttattaatacttcctccccttgcaatgtagcgggcggcgccatctttccctttggtgagtccggttagagagtcactggacggacactatggttgacatgtttcgttctgcacagccacgggagccctcgcagaccgattctcgatcaaggtcatgcaaccctgtatcctggcgctcatgttggtctgcgtgatcagctggttccccatcgactacgctatgcgcaaggctgcaaaggccaaactcaatcgaggataggattccatccagcgcagaatgggcagggaagctcaaaacaggcaaagtgaataggaatggacaatacgtctcgttatataattaatcaggtgcatatgccttgctggcgtgcaatgtacttttatgtcagtcacgatttcatccttcgtcagctgtgtgacacccaaggcaccggtccttttgctttgatccgatccatcgcttcgatgccagactgagagtctaggttgcgtgtaagctcctatcaatatgagtgaacaggtcggaatacgagacccaagatgtgtcttgacagggctgcaaaggatcaaagcgttccgaaacaagtgatcgacatgcgtcacttctcgtacgcctagacaaacagattccggtcgagcgacacgtgacgatgctgacaccgcgactgacttcggttacctgcctgctgtcgagcggccctgtgggtggtttcgaaagccattacgcaatcgcggaacttcgtcatccgctcacactctctgcctcgctctctacgtctctaccttcccccgcgcctaaccccctttcttcccgcgcgcactcgttccgtcctcatccagctccccctccaccccctgccaaccggaaacttggcaacctcgacaccgcctgaactgcaaaacacctgacctaacagcgtttaaccccctgcctgcgttccatcacactggatacctacaagtcacacaagattattcacttataatctacctttcttgaccgtctacgctcagctctttcagcttggagccgacttctcttcgcgaaacctcctacctacttgacccggacgtccatctttggcgacacctacacaacataatggctcccgtctctaagtctagtaacaaccttcccgccgaggtccaggccatcgaaaagtacttctacttgactcccgaaagactcaacgagatcgtcaagggattcaggaccgaatttgaggatggtcttcagaactttggtcgggacaccgctatgattcccagttactgcttgaacgtacctgacggtactgaggtcgggtgagtccggaccagattgctggagctcacgtcggatcagtactgaacttcaattggtcaaatgtgcgtaggaccttcttggcgctcgatctcggtggtaccaacctgtaagcctatgcagaccggcagaccgcttgaacgtagctattcaagctgatagtcgtcaacttccctgctttctagacgagtttgcgagatcaccctccagggcgagaacaaattcgacgtcaaacagcgcaagtacaagatcaccgacgagctcaagcacggcgaggctcgagccttgttcggtaagtcaaggcatgtcttcgtgattaatgccaagttacttatgtcttgtcgttatatccctagattacattgccgactcggtcgactctttcttgaccgacattggtaccgagattgacgagaacgaaaagatccaccttggatttaccttcaggtatattgtgaaatcctgacctcaactcggtccatcgcttataagctctctgcacagtttccccgtcgagcagaccgctttgaacaagggaaagcttctcacctggaccaagggatttgctgccaagaacgccatcggtcacgacgtcgtcaagctcttgcaggacgccctcgaccgcaagcacgtctctgttaggtgttccgccctcgtcaacgacaccgttggaaccctcctgtcccgatcttaccagtcgggtcccgcccttatcggtgccatctttggtaccgggaccaacggtgcatacatcgaccgagtcgagacgatctccaagttgggagaggctgccattgccgagagcaagaagggaggaaaggatgccggagaatacatggtcgtcaacaccgaatggggtgcgattgacaaccaggtgagttggtcgtctgacgaaatccggtgcctagtactgaaaagacttgtgcccggtagcgcaaggttctccccgtctctatgttcgacaacaagctcgaccgagagtccatcaacccgtgagtatgagatcgatcgatgccggaaccttgatcttgctaatcttaaatcctcctttattagtcgaaagcaagcctttgagaagatggtctctgggatgtgtaagtttcgtctgcattttgatgcgtatccggattgatgctcatataatgtctgtccataagacctcggcgagatcgtacgaaacattttgctttacttgatcgacaacctcctgctcttcaacggtcaatctagcactatcctcaacacccactatggattcgacaccgcctttgtttcggccgtcgaggctgtcaagaacgctcaggaggccaaatcggtcattttccgcgagttgaacatccccgagagcaatatcaacgaccaagatgtcgagctcgtccagtgggcttgccgggccgcatcgacaagggcggccgcccttgcggcttgtgccgtcgctgccgtggtcttgcacaccaaggccctcgagaggtcggagcctatcgacgtcggtatggacggaagtgtggccgaattcttgcccttcttcgaggagcgactgcgagcagctctccgcgacactattggtgaggaggccgagaaacgggtgattatcggtctggccaaggatggaagtggagtcggaggtgagcccctggagtcaaacttctatgcgagaggttgagtcactaactcgtcgccccgtctcagccgccttgtgtgccttgcaagcgtacaaggccgagaagcagggtcttcacccagaagtcaagaagatggaccctattatccccggtcttgccgaccgatgatcttgtaacaggaatgtagcagctctcgggtcatgatcaaaacaaattctgtgatctaagatcatccattttcgggatgcaaatttcctttgagatgagacaaaccaaacaaacccaaatccacgcgacgcgtcgaaaggatgggatgggatgatcagacatcatcatatccatcatcatcgtctcattgaccagattgttgatgaaccttccacacgaatgacagacagttgacattttctcacgagattgatctctctaacacatccgacgcaagtgacagctcgttgctcttctacccctcccactcgaaaaagaaccgccagtgttcatcgggtggctcgcaatgccacctgctatccggacacgagatcgctcgtcaccatacgctgatggaaacggagaatccagtcgagctgccaatgctcaggccactggacgtgtgagagcgaccaggagtcgatcaggttcggccttgttttccgaagatgacaacgacttgatcgttgcaactcgggtcacccgttctcaagccaaaactccggtcgtcgcccgcatggatcagattattgaggacgaattgatacatgacgaggacgacgaggatgacgaggccgatgacatagctgttcaagagatccctaaccaacgtagacgtatggagattaggcgatccctcgtcgctgggtacggagatgatgaagggaggctgcatgtacgttccaaagtattctcccaacccttgaccctggaggagcgggcggtcaggctacgtcgtgacgctagtgtcgttctgcaagctctccttgaacaggacggagaagactcgcaaacacctctcgggatgctcatggcagcgaaaactggcaacctccgctgtgagtgcatacctgacagtgaccgaacgttgctaaaattcaggccattaaatactcagctgcgcgtcaatcaatatactacaacgagagcttcgaccattttctcgacagggaggcgctattatcggtccaggactacaacccattcgaccattctcagaccttgaattctgccgtccgtctggccaacatcgctgcgtttgtgcaaatcatcgactcgccagaggaggctgccgacaagcttgaaaagcacggcgacaataagaccgtgccttacgctttgagagaagcttggctcaaattccttccgctttgcgtcaagaagccctggaccggtatcaccgagattcaattcttggtagatctagcaacacaggtaaatccgccgagttcaattgtagactgggtcccatgctgattttattcaacgtagcgcgttttcgtcgaactcgaggaatctggaaagccactcatggcaaatgggctactgaatccgagtttcgaggaggcgctgtccgagaaagctttcgctgacttgccaggctggctcgaggaagatgacgcgctgggcgaacgagacgatgcgctcaagttttggcgtgagcggacccggatccagagagaaaaggtgagcatgcgatctcgcatctcaattcgtttacgcagatcccttacgccaattctttccggtagttgcaaagatgcaagacgttgcaagctgctatggaagcgctttcgtaccaagatttcaagcaagatatgctggtctatatcggcaatgcgctcgaaactcttgacgtggaagaagatccagggcagccaacggtcttacgtgatcttcctagcggcaggatcaatgaagaggacggcaatagagaggacgagcaagatgcaatgaccattgacaatgaagttactcagttggacgaggaggccatgcaagtcgcgttcttgtctattttcatccaccttgacgtcaagcactgatgcgatcgaccgttgacacgccttcatagctctggcgacgaagcccctgatatcaatctgtcgcaggcagaatttgatggcttgcgacagaaatattcgcggcaggatgactcagctaatgaacaagtgcgagacgtcgaacgagacgagggtggcgaagataacgatgatgatgacgatgatgatgaagccctggctgaatcacagtggcaagtgaaaaaggctcgcggattgatgcagccgggacaggccatgtcgggaggcaaagcgtgagtcggcaaacgttgacttcactctgtccgaagtctcgctgatttcgtaatttttggatccacacagagtcgggcgagcggatcagaggcggtaagcctgtttgcgctcacaatcagacagcttgggctgattcgacgtcaaactgtattctcagattggtgctcgagtccgccggccctgtcgagtgggatagtcagatcgccgagcctagccaacaaggaaagcctcccaggaagaggcgagtcgggcgactcgcagcaagaagccaaccagcagtagctcctgaacctgacgctgcggtccaagaggacacgctcgaagccgcacacctggaaaataactttgagggcgcgcacgatgggcttgaagctggaaatgcgctccttgcagaatcggttgcgtctgaggaacgtcaagggggtcgaatccatcctcaaagacgtcatcatcgagctggacattacagtcatcagccggatgtagatccgccacgaagggccgtccgcgaaccgagaaccgcccctgagaacgatgagcaagagatcaacgtccagcgtcccgtcggcaaggcgcaaatctttgccatggacccagcggatgattacctctacgacgagagacggagactgttgcatgacaagaatggcagggccttgcggttgcacaaggggtacttttccaagactaacaccacgagggagcaggacaatcggatggcgtatagcgaaagctatcgtgatggagctcacccttaccgcgccttgctacgaacaagatggtccagagaagatggtctgttcctgtatcgcgaggttcaaaaggtccctagcggactcatgggccaacctactgcatatgtatacaaccgattccaccacgaaccttgtttcagagggcggaacagcaaccaagtgagagacaaaatgaaggatatggtaaagcagcggtacaaaaccggacgattggtccttgggtctgcccgtcactaccttccaccgacggaccctcgacacgttgaataccaagaagagcgtgttatcgcacaagaacacctggtcgctcgacgtaaggcgaacgaagaggacgctgctagtgatcacaacgaggacgagcaggactacgtatcggaggagtttgaagccgatgttgagagcgaggctgagcaggaatctggtttggaggagggcgaagaggatgatgcgggaggagaggtagtcgaggatgagattgaaggcgaagtcgaggatgaagctgcgataaacggcaatgctcgtggaagtggcccggggaaagaaaggagcgaagttggttctggcgccgctcccgcgccgactgatcgcccggctggcgctgcctctaacgaaagggcagccgagttcgagcccgagaacgcgaacgctgaagagcagttcgaagaggaggaggaacaagaggcggaaacttaagacaccggctctgatccagttcatcagctggcagtttgtcaggcaatacctcgttgcgagacgataggtttgaacgattgtaacaatacggatattggtgacgactataatgcttgacatctaatttagcagtgacggctgatctatgcgtgttcggcgtgatgcaaatgctgcaagttcttgaaaatgccatgacggcgccaagacaagtggttacagccgctaaagtcggtaaaatgaacctttgacgagaccaaaggtgaaaccaggacgtgaacggtaaacaagaatgtgaaaaggattgctatgatcgtgaactcgtgggtatatcgtaaagtagagatgacagaattccggctcagatcagaagcttagcagccaccctggtggcagcaatgacacgagtcgagtcagtggtgggatgcagtgaaattcttcaacggttcaactcaccgcgagtcggttcttgggcttgggtgggtgaggctccgggatctggtcgaatgttgaaatgttggggttgctgtaatgtccaatcggggcgagtagctcagcgactgaatgttgcgatgccgattgtgaaacacatacgtataggccgccttataagtctcgatgtactttgcagtgggcatgtcttcaggatcacagccgaggtccttgactttgggatcttggtagactcggatatagtcaatcaacatgtggaccggccaaattcgctcgagaccttcgtagctgcgagtcgagatcagaattgagtcagtaaagggtctcagccaagaaacgtctgattttgcgactgactcgatggctccgaagttctcggacaaacccaagttgatgatcaggtacatcggctcgtacgggatgggtctctgtccaacatcggcctccgcaacgggtttcagggcagagctggcgatccaccatgcgggtttcccgtcgttcacccaccagacgtatccctcactgtagaaccatacaccgggtcagtctgaagcccggtgtcagctcgactctaagctcatgacttactcgccatgagcatactcgaacccgtagatggagtaacaaccagtgtttctttcactatggagtccaagagatggcgtcagacggcaacatggcgagctagacaatacgctacctactagcagttggggtcggtgtaagagactccggaagtggcctgctggtaaacacctccaaggtaggtattgatcttggtcatgtcgtcgtccatgatcaagtagtccgtcccggacacgttctgggaaaagtagtagtgagggttgaaaggcgcccattgacctatgcaatgtattcgtggtcagcctctagcgcgttttcggatgttggaaatgaagcccgaacttacaagattgggacacctcggcaacgaccccgtcgtcagttaataagacctgtcaagatgaagcataagccacggtacggatagcttataggcttgggtagtatctacctgtgcctcgatcagatcgatctcgggagcagctcgtcccttgaagtctccgttgggcttgacgggtcccggatgggtggggtcatcagggcaagtgcatgaagagagacgctgaccggtaaggtaggacagggatccgttgaacggagaagcctcgggacccgtagtcagcgctacgtccggaccacctgtgaatgtcaaaagcgaatgatgccatcagcccgagttgcaatcggcgagtgtcgtgagactgaccgttcagggtctgattgggcatggtaccggtatcacacgagtcgtacgagtatggccacattccgtctagcgtgcctccgtaacccatcctaccgaggttacccatggtccagacagcaggccagagactagttgtgatgaggagttagtcgaggccggtcgaccgtttgacgaatctcgcctggtttacttacccgtagacactgctcgaaccaggcagtacgagactcgctgggttgcgcaaaaggtaaaggtaccgatgggcattagtatcaagaccgcggcacaagggaagaggtctagcccctcactttcaacataaccgcctcggaaacaaaacttgttccaggtggacatgagacctccagtgtagtccaaacctttctggggcgagttagtcaacgtgatcttcaagttgcctccctcggtagtgatctgtcgagggtcgtacctgtgaacccatcgaccgcgtcagtcccgcagctctactttgacacggcacgataccatcgatctctcgtgactgaccattccaagttgttcgttccccagtagtgcatgttctcggcctcccagaaaggatcatcgccgggccagaaagtcctgccgtcctgattaaactcgtcactgaagacgagatcccaagtctctcctgtccacttgctcgtgtacgtgtacgcctcggacggggtatcgtcgtcgatcaggttgaagtttcccaatcgagtggccacctgacctgtcccgttgattccaccgagattgtaccctccgagcgtgtctggcttgtcagcgccaaagtagacgatcaacggatacccaccgaacagggtacagagggcgagcacgaggacgaggagacatccgacgttgtacaatccacggatggtgaagatggtacccccacgatcagactttcggtcccgtttgggatcggggttgtgcaggtaatcgtccggttccgggtgattcagagcgacgttggcaccccacgacgccgggtcgggggacaaggaaaacttgtcgctgatgctaggtgccaaacttcccgaagcgttgttctgtgcgctccatcccttttcgccgaaagacgtggcgccgaccgcacctgatccgccccggtaacctcctctcgagttgatgctcgcataaggtccagccggggcgtgcaaatcggatgatgaaggtgtaggagaacctgatcggtacaatggttgtgccgagggtgagaggtgaggagagctggcattgtatcgctgcagaggggtcggttgaacggcggtcacgtcagctttgtcgtttgagagatacaccccgaggcgagtcaggaaagacgagcttcactcacgctgcccatgctatcggtactaccttgtcggctcatattcgcacccaacaatcggttctgggacatttcctcgtgatgacgatcgtcgtaaccgccgagcaagggagaatgtccaccccctgtcaagctcctcgagggtgaaggtcggggttgctgtggtcccgacgacgaggacgcgttgctgatgaacggattgtgcgaggtgttggagacggcggcgttggtgttgctaggaccaaaggcgtagttgttgctagattgtgaaggcatcaagtggaagatttcctcgggatcgaggtggaggaataggtcgaacggactgggaagggggtaaaaaagggtgataggtgggggactaggtgtatctgactgctgtgctttgttttcggtcgtgatgagggtcgggatgggcggtttacgcgaattcggtagtcgcagacaagacccaaggaatgaggaaaggcgccgagagagagagaaggaaagaaagagttggaacccgcagccaaagagagggcaacggaggtacggggcgacgggaaggcgataagatggggtgaaagggtgtgcgggggagtaagggagtcgtgatgcagacgtttgagtggtcgttgcgtggtacgtgatcgatgacacggtggtgttttccaagaagaaaaagggagagagagagggggggaggaagagggatgatcagcaagaaaacaaacgaattgttgatggaacagagccggtcggtggtcgagacccgggtcgagagagctgtgcgtggcggagagggtaagggagcgtcagatgggtataagagacagggatcagggcgttcccgagtcgagggcggtcgaggtgcatcagcaaggtgcggaatatgtagcatagtaacagtcgggccggtttatgtttttgttttcttggatacgacaaggtatacatacatcattacgtccatgttgacgatgtccttgggggacgggcgggacagcacgacaacgtataatctcgctcgctagcgtgtcgaaaggtcctttgcatcatagtcggcatcgtctggctagggcttcttttgatcgctcgttctggtctcaccggtcgagtagaactttcttttccctttggatttgccctaatttactaggtctcgttcccgtcgaaagtctataggagtgctcagcagtactagtactgtcaagagcagcccaacgctgctacctcggaggatgcgcgcacacccatcttatcggcctacaacatcagcaataacaaaagccggctacaaccgtacctcccctgtgagagaaggaggagactcctggctgttccaacgggtcctgattactgttagggtgacccatcgagcaaatccgcttgttaacctcagtttcctttcgcattcgtcctcttccgaatagtcccgcgccgttggtgtgattgatcggacacttggagcccgtgatgtagatatccattccatcaccccttccaggcatgagactggaccgttcatgcttggaatcttgaggatcagtcgtggtcattccgaggtggccaacaatcgactcagcgcggcgaccaatgctgtcggaggtgacacgtctccaggatgaaaggcaaaggcttcggtgccgctgaataggtttaccttcggagggacattgcaccgtctcgccaaattactctgtggttgccatggtgaaggtacatcttctggtcgatctggttctcacctgagtgaacataggtaaatctcggatgcccggtgttcctcgttttggtctgtcagtgaacgaaggagcagccgactttcccggaaaacatcgaaatcgacagaactgtaatacagaactatgatgatggcacgtcccagattccttatgtatgacgtcttcgatccgacatgcgaatgtgaatttcgttcgggaaacaagagcggcatcgcttcagaaggtaccggtctggtttccacaaccacgacgagctttggacataagcgcgacgtttgttgttggtgaccacgaagagcctcagaaagaaccattcgcctattcggtgcgtcatctcgtggccaggcaggtataaacaggcatctatgcataccaatacgcgctctcttgacaacgttcgaggggaaaacaaatgccggtcgtgacttttcgacgatgattgatcgaattgccatcagatcaccagactcgtcgctgtgaaacagggttgttccgcgcgggatcatttgtgatgtcattgtccaggcgcaattcgagggaaagtttcaaatgggtcgaatcagctcgtcattgatcccgcctggtaacgaggtgattcattccgctgatcagctttcagatgatcactggactgcggaatgtatataacaaggctagtcgacccgtggctatcatggtcacttgtctaccttcgacatcaaacttggcttccaacgctctccattcggccaaaacgacgcacttccaaaccggatttatacaaaatgtctgacggtgagcctcagcacatatcccagtcaggtctgtaaccaccctcggctcagctgatgttcatccacaacagccagagttatcggaggctacaaggccaccttgagcaatcccaacaccagcgacgaggccgtgagcacgttcgtcgcagagcttttgaccttgtttgacgtaccgtatccttctgccatgatagaaagagcacgcccaagagatgatcgacgagatgactggaaagtccaaatctgctggacatcagaaaagacaacatgtcgaccacgaacaggcttcccacgagaccgacgacgggcacaaccaccgcgtgagtctagactgtacccggggtatccgtctacctaggcgaagcctgatcaagatcttgttgttattatatcactcgattctaggttatcggtggataccgagctaccctcaacaaccctaggacttctgccgaggccaaggaacacgctcaagcgatgatcgacgacctcactggggtcaagtctgagcccaagaccaccggttcgaagaagcagcatgggaagcacgagaaggagaccgatgacgagcacgctcacagggtaagcttttgtgagcaagacgtcgtccccggcaagcaattgatccgtgtgatcccttgccagatcattggcggccacaaggccaacatcaacaaccccaacacctgtgagtagtccgtcaagctcgaacacatggcccgaccagtactgataccacatgtcctgcagccgaggcatccaaggagcactccaaggaggtcttggccgagtacggagtagtcctcaagtgatcaggtacaacgtggctcccaagcagatcagtagatttgcgagcctgtacacctttcacccaggtaattgcgcgaacgtactacgtgagagagaatatgcgatttctatacatcgggtggatcgttttctgccgctccatagtctaggatacatgagggtttgctcagggaagtttcgtgtgattcttagccgccgtgaaaaggatgtgaagaaagagggcgggacgaggtcgtgatcatctaggagagcaggaacccttcggctccttcgtgcattgctctgtgtagttgagattccatgatttctttggtggaatactcgggcaatttcaggtactaaacacagcaagcacattcaattagctcatatctttgtacggtttcacggtgaaaggactctgaagactcacctgggcgcatgtcatgacactgggcaagtagtcatccggtttgaaaggaggaggttcgcgtttcctgacaacagtgaattggggatgtaaagccttgaagcctcccagaggaagcttcggagcgcccgtaatgctaccaagtgccatcgacgcatgaatgagccgcttgaagacgatcgagcagcggagcagcgaacggcttacaatctgaggaatgttcgtcgttcctgcttggtatagccggtcatcaaatcgatcaggaagcggacctgcttgctatcgctgtggtaaccatgatcggccttgagagcaagctcgacagctgcggaagatcaacagttaattcagctcgagcccgtatacatggctaccggcatccatactcactctcgcgagaccaatcctcatcggggtttccgaacagtagacccatctcctctggagagaagatcgacaattctttgatcgggaagatgcgcgagaaacctggaaagtgtcgatcaagaaacatcagtcaccgttcagcgatgcaaagcgtcgcgctccctcaccttcacggaaggcctcgacagagttggcgataccagtctctagagtaaccttatagaccagtccgatgtattcttgcaggttttcgagagtcacgttcacttccgctccattttcctaagggcgtgaccggcacagataagcacaaaaaaggtctaccgcaagcttcgcaggctgtatgccctactaacctttaaggggatatcggcgtaaccaggaagagtgaagtccaaagccagatcatcgattgaagcgccatccaggctgagctccgcgtaagctcgagacctagcgtccgatgtctgcggcatcaaacgcaagtgacaggacatcaatcactgctcggtcaggagacggcaatggaatcaacgaaccaagtctgcattcccatcgatctgctgtttggccgtcaagagcttctccaatttgctcatggtcctggcgagttccggatcaacaagctacgcaatgaatgactttaatgagcctctggaccgaatgcagaaaatcgggacttgagatcctcacccttaaagtgtcaagcgacaggtcaaccggatcgcctagaatagtcttcaaaaataccttgttgaagtggagatcgatgattcgtgaatcgtaaagagcacgtcccacgaacatgcccagaccttggaaaatgggggccatatccctgtgagaagacgttacgtaagcttatcggcatggcccttgtcgcagacgcaatggaactcactggtccgaagttggccctgctgagtcaccaacaccgaaaggccgagggaacaatccatggggatgatggacccattcgtcccctttgctcgggtcctcgtcccgccacatcctgttggtccgcgcagcgaatgcttttgaggccaacgagtagaattcgagagttggtccgagacccgtgccatgttcgtcgatatattgatagtcgaggatgtacgcagactgaccccaaagctccatcgcgcgtcgcaccgacatcaacatgtgacggcgatcaatgcgcagaggctgccgccttggtaagggtaggtaacgggttgcgtattcgttctgtcgcgattgaccactggacgcggcagctgacatatgccgctggcataaccgaggtaagccgaatgctgtgctttgcatgaaagtgtacctggcttcgaaggggaagaggaacctgaacgatttgggtagctcggtggcccaagatggaagagcctcgctgtagaaaagggtaccaagcgttaggcccgagaagcggcaaaatgaatcactctctgctcaccatgcgaccaacaagatctcgtctagttgacgaatgaatttggcggtcattttggcattgatgaaaaggccttcatccaagatgcgcgcgtccacttcgcccagcttgtccctttgttcctcgttgatggcatggatgatccgtagcattaacaacacggtagcttgcggggattccttcttcagcgttccgggaagaccgtcttcggaggcggggtcgacgtgtttggggatttccggctcgcagcctgagacgccgagagaaaatggatgagtttcccctttccactgtgtataccatgtcattggcttaccgggcaaaggagcgggaccttcgacctttctgacctgaagcggttgtcgatcgtagaagttcagtcgtacagtggttcctgacatcctcttgaccctcgaaagcgcgccgaacagcgattcctgataacctaagtcgtgaccgttgtgtgagaaacggtagtggaaatccgtcgttggcgccttcaaagcggcagcatacgaccgcgttcggggtggcacacctgctacccgcgaggtatcggcggccgatgcttcaggggtaggcgtcgctactcgggttccatgaggggtgatcccttggggcttggagccgtctgatgagggctcgtcgtcagtcacccggacatgctaccgggagatacagcgagcccactcacctgagggtacctccaagtccacggtcttctcttgaagctgatctcccactacttcgtcatcttggtcgggatcatcgtcgtctaggtgatcttcgaggaactgagtggaggacggcagcataaagttagcattagtccgtcgccagtgtgacgcggtttggagactgacgatgccatctccctccatttcatcgtccatgtcatcatcgtcatcctcatcatcgagcaacatatccccacccatgatgtggctatgtaggtcctcgtcggcatgctcggcatcgatttcttcaccgttctgtgtggaatgatcgtcatcgtcgtcatcctcttcagctcgatgttccgcgtcctttaggtcagctgatgcagtcggggcttgcgtgcctgcatcggccggggttatcgctgactcctcgacatcctctcctcgaagacgggcgctgcggcgagttgcgggtttggactcggctgtgttgggctgtttgctgctggtagatcccgttgtgcctgctggaccggaatccatcattgcgtctagatcagtcttcaaggccgagttcgagcctgtgccggacagtcgcgtactagaccgcaagaaggagttcatcgacgagattggagccacgcacggaagggcaatttcgatcgacttggccttccaattgataggtagagggctatcactggcagccgataattgtaccgtcatagtccttagcaaggtgggcaaagtacgcttgggatctactcatcatcgcaaattagtaccgaaacaatgtagacggaacggtagagcatcgagctcacccgtctcagccccaccgttggtggtttcgacctcaaaattatcaaggcgactcaagctgtcctgcagtcgcttcacgagcaaccccagcggactcatttcgccatctccagaaatcacggccaaggcctcgaagagtatatttcgatgggccacagctggagcagtgaaaagtcagccgaaggggccggacagacaaggtcgagatctgaaacgtacccttttctccctcctccaacatacccatcagtttagctaacaatccgctttgtagcatctcgaagctcgagagcggctcgaccttgtccgtgagcagatcggcaatctgtttgaaggccttccgcaggtcgctgtcggttattttccggtcagacaattgttgtatgacatcgctgacgccagacgagctcgagggtgcggtacgaccgctatcagatacgctccatcttttgatctgcaaaatctttgctctgacaatgttggcatcgtgagggttgctgggaacagatgagactctacgcgaagaagaggaggctggcttggcccgtgcgaccccaagggcccgctcgaacgccgataattgcaccggatcctcgccggcgagaaccttgagcaagctcggagcggaagtggcgctggcactagctgcatcgggcttttcagcatcggttgctcctgattgagaggcagactctgtgtctggcttggtggatgccgacgatttttgagcagcttctttccgtttcgacctggctgaggcggacagttcttctcccgcgagcttgtccatctcgtagaacaccccctccctttgaaaagagcgcgtgtaaatagttggcagtttgatcaacagcagttccgtaagttgcagtgcgtgcgtaacgagagctgggttgtctcggctcgtcagaatcgaactcaagaaactggcaaaagacacgttctgaagaggccagtcattgtcagcggtccacctgcttgttccacgtcatccacgtcacggtctcacctgcagcgcctcggtcaactgctcgtctgagcaaaatgcaatcgatctttgcaacgtcgcgagaatacgcgtccttactttcagggcggcagaagcattgtagacatcgaccagaacgggaatgaggattttgctgaaggtgtcgacgacctcggcattctcctgcaggacctcttggcgcctcaagatagccgcctgtgcttccaccttgtttcgctccatcgcctgattgaggcccgaaacgccgagagaatgtgcttgaggagcgctggtaccagcctgtggggttgacgctcccgtttcagtctgaggtgtctccgccggaggagttgcggtggcagctgctgcggcagctgcatctcttgaagctttgacgatctcctcgagagtttgatccggagtgatacccttgtcaatctgcctttgaagcttgtccttcgccttgacgtaacgggccaacattcgttcagaatagtttcgagggtcaaagacgccgtctgaatcgtgagttcactagagcgtcagaacaaatcgccctttctggtcgagaagccgctgacttaccttgtggtgcgggcggcaatagctcacaagccaggttcaaaacctcttcaatctgctctttggcccgagcccccagattttggaggatgacggcttcggctggcgcctccgtctgacctttagcaatgtcttgctcgtcgggcggcagaagaccggttaggatgaaatagatggttcttgtgaaatccgcttcgaacaaagtcatagtgaccttggcggagcttcgtacaccagcagtcaagaccttgagtagattggtgtatactgaggccgacatctgaggggaaccggatcccggggtcaatgccccgttgatggcgtcgatcatggcccgatcgagtacgtcctcaaggatgtccgccttgtacacatagctgtttaacagacgatacaggatgttggctgcaccttctacgagcgccgagtcggatcggccaaagagagcccgaacgtgaggcaagatttccttgatttttgggaactcggccggggtcaagtagcgacagctatagatgaccgcactgacgatgcttttctgcacgtgaatgtcgaaaaagtcgagaatctcgagcatgattttcaaaccgttttcctgaatgataccggtacctcgcgattggtactcggcgagcttggcgagcgtctatagattggcaaagagacccaatgagacgggattcattcacgtgctatcgatgtgatatgctcaccacgatgacctgctcggctagctcgatgttctcgatactcgtcaacttgtcacacagcaccttgacccctccgttccgaacgatatatccagccgtcatgccgtgtccttccgacgacatcatcaagttttgtaaacagcggcacgcgagcaattgagcttgctgatcttgttcagggtccagctctgcgtcggccgaaggcatcttgccgcccgagctgagggccatggcatacatcatttgttgctcctcggtcatcgagtcaaagtcgtcctcagcgtctgcctcgacaacaggctcgctctggcctttctcctcgccgttctcgtcgatgatgggcttgccagacatgagaccgaggaagactttgacggcgtcttcccaaggaaagtagtggaattggtcctcttgcgcgagcgcgatcgtcgtagtcgcctcttgcagcgccgagtacctgctggccggcttggaactcttcaagtccttcaacatcttcgtccacgtatcggatctccccccgcccatccttccaccgccgaagaaaccacctgcacctgcacctgcgagggtgttcatcagtgcttgaatcctttcaagctctgctgctgatacctcaccagacctgggtagtgaaccaaacaggctggccatggcgctagcagagcttgcacctccgacttctcccgcacccgtcccggtcgacttggtcttgtcttgtctgatcgactccaggtcatcatcatcctcgtcttcgtaatcatcctcgtcctcatcaatcgagtcttcatcgctattggcgtgcggttcgggttcagcttgacggcgctttgatcgcctcgcactcgtcgcggctggtgtagccggggcagactttttgccactctgccctcctgcactctttcgacgagctggcatcgggttcggttcgacctcgtccacttccatgtcttcgaggccaggtaccacttccatatctgcttgatggaaaggagcttggtcgtcagctcgcgctactctcagtctgatcgagtcgtgcatcacgcgtaccgtcatccgtttcatagcccttcttgccgttgttcttgcctctatcgcacgttacattgtcctatcgtcagtctcttaggtagtcgtttgagctgtggacgatccgactcaccttcctttcttggccggagccttgcctttcgctttcgcgctcattttgtgcttgtctacgacgcccgtcgtgttcttgctcgcttcgctcagacgagctcgcttcttggcgggaggcttgatttccttgctcgccaccgaactggaggcgacgttgctggcggtagaagaagcggcggcgttctttgattggaggttctgttcaacctcgtcttcgtccgagagttccgagagcgacgaggacctggctcgtttcttgcctttactcttggccgacgcagagacagaagcggattgagtgcgagcgcgagggctgaagtcaagatataacatggatgtcagtcttgcaaggtctaggtcacgtaatttgagcgttcacaaagggataatcgacatgacccagccagtgatcaaagtctcaaagaacggcaccgggctggatcggactgctatcgcttgagcaattggagtcgtaactcacgcttttgccttggggtctttcttcttgctagttgaagctttgctactagtcgagggttcgatttcggcttcctccgtaccaggagcggtcgatttcctcgctctggtcttcctggtcggtcgagcggtgtccgaagcttcaggtaaggcggaattggtcaccgatttgtcgttcgtaacttccttgttggagatggtcgtcccgcgggtcttggcggtagaagacttcgaggatcggttgttcttggtagatgctttgatgtggttcgtggttgccggagtatcttcgagatcagattcgtgcggagtatggcccatcacggtgaaggtgctgagtttcactgagaacaagcgatgctagccatcggaactaccaatcaaggaggaagagttggaatgcataagtctcgacaactctcgatggtatgaccgtggtcgattgatgagcgatcgccgcaatcgtgacgctcacctcgtgcggtatcgattcgtgtcgttttcgtaactcgagagaaccaactccaagatgctatataaatgatggataccgtttctactgtgtgggtcagcaggactgcgaagctgattcgaattcaggtaggaagaggcgatgtcgagatggcaagctttatcgtcgtctacagacttggaagctgatcaaggacggtgacgaccaggggcttcgggatccagcgtgagcgtgaggctaacatgatcgatatgccaaaggaggcggcactcggaacgtgaaagttgtcagcttgactagttatccctcttcctccgccacgtcatatcgagttgcaagtcgagtttgcgcgcaaacctgatcttgatttgattgatccggagagctctgacataaaccactttcgtaagccaaggccaactgcgagcgaacagaacgcgattcgatgcatagaaacagacgcaaaaggattatctgcgaatgtataacacgcttaagtcccaaggacaagccttttcagctccggtctcatgcgaattcgatgaaggagccgaaggccacgagtggcagtcaatatcgttgaacatatttcacgtcaacttgtccagcctggctcgggtgccgaggacgcgggtcaagcgcaaccgttttcacccgcgccaaaagttgtatttttcgggcagcgggcaaggaaagagagggtagaatgtgaatgagccggttcttccgctgaaacctatcctcaaatcgcaacgtatcgattccctcatatcttctcacatccggcctacgtttctctccttcatcgttatctctggtctcgtcgtctgctgctctctgggaatcagattcttgttcaaggagaaaggaaacgtacaacaacgaaaataaaaagatagacctcgcccttgacttagctcattcgccaggacaacgtctttttttccgaactccggtccatcagtttcgacatacgtaaaaggaaggacaattcgtctctcaacttcgcattcgccttgatcccaatacgacccaatcttataccaggacctacatacccgttcttcgttctgcaagacccctcgaagccggacgaaactcgctcgctagcacactttataaacacaaaacgccaaaaagtcgagaccgactcgaacggccagtaacctcgtctcacccctcgaacagccgaggatattccttctctgcgcaagtcatctgcacagaggaacagaaagggaacatatctctagcaagaatggccgaacctcagacccaggctcagcctaccgagcctgtcgctcgggtagaagagacctccgctcaggtcgctgaacagcagacagaggtcccctctgcgatttctcccgatgccggtgcgacctctttccaggctcagcaggagcgtatgaagacattgcacaagaactgtgccgagggtgatgtcatgggcgttagggggattctgagcgggagtttggaattgttggagagcatcggtaagtcatttccttgttgtgtcgaggcactggattgtcgcatcgcatggtagtggtaaaggactcaggtcagaggcatttgagtgtgtctgtaagacgaggctgtgcggacacggggaagggggagagaaccgtcatagacgatccgagcagcaatctctcgtcgcaaagatctttcagtctcgtctacactctgatttgatagcgtcgggacaagataccgtgtcgctgttgaactctattgtgcctctttgacgagtggatactgatcgcaaacaacggtctcattcgaacagaccctgcgaccggtttgacccctatgttgcaagccatatacgcaaaccaggtcgaagtcgtgaaggaattgatgatggcaggtcagtcacaagcgcaatgttgaacgaattcacagagagtagatgctgacgtatctcggacatcgctaggtgcctaccctccccctcctaccgtaacttccgagccggctattctagctgtgctttacccccagctgccgcctgcgcagttcggcatgccccatgctccggcgcactttgcgcctatgcctaacccggcctcgtcgagcgaatttggctattacggccaatccggatctgaacaggctcctattttccctggaaacggacagcacaggccgtcggtatcccaggagagacacaacgacgctaccaagctccctcctaccgaggtctccaagaccattccttgcaggaacttccccaactgcaggtacggagacgcttgcgtcttccagcacccccagcctcaacccttttacccgtcagcggcttaccagcctgccgagtttgtccccggcggatttcctggtatgcccatgtattacggaatgcccccaccagcaccttttgttcctctcgatgcgcaaagcccggctttcgctcctcctatgcctcccgctcagcagagacaaatggacgagatgaacggaggtgtacccgtcccgtcggcagcaggctcccctgctggttcgacacctatcgctctgaacggatctgcggaggccaacggggcttcttcggactcggcagtcccctcgcagcaagctcccgtcttccaccctcgtgctgccggtatgaatggattccctgtcaaccagatgccgttgcctcagcaacccgggtttgaccagagtaagaagggacaccacgccaagcgaatgtcctttggtggtatccccaaggccacttgggctgccaacggtggcggtcctgcggcaacgctcgccaggcaggcagctctcggttcctggagtaacggacagccccccgcatgtgtgttcttccagaacagcaagtgcaggaatggagagatgtgcaagttccctcacatcatgcctgatggcaccgattgtaagacaaacagtagaggtggtgatttaacgcagttgctgacgacaatgcttatcttcaggccgtcatcccgacgtgatcgctggtaccgtcgccgctgcgcccgtgtcgaccaaccccaacttcaggcctcccactcgaggccgaatctcggttggaaacaacttccacttcgagcgacagcagcatttcatgaaggtccaggctatgaggcagcagcaagctgtgtcccgtgtctcgcaaatgtcgaccggaacgacgagtcccgctgaagcagcttcgaacgagacggagactcccgccgccaaagaggaggacgcagtcaagaccgacgcgcccgcccctgctttgcctgcggctcccaaggctcaggcctctgctcaagcggctccccgaactcgaagcgttcctaacacccgggcgcattcacccaactcgaacgtcccctcgacctcgagaggacctcgtgtcggtggcagatcggcgcagattggcaacggccaggctgcgcgatcgacttcgattcccgctgctgctaaagaggtcaaacaaaagcttcccagcgctgacgatttccctgctctcgccggctccaccggatctctaagcggggacagcggcgtcatcgtcaagcctggtccttacggcagcaagactgctgcccaggtcttgtccgcgcccgcgcctcctaagccagtgactgccgagcctgaggaggtcaagaccgattctcgatcccgagcttcgtctgttggacaggtgagtgctgcagttcggctcgatttggcagtcgacccaatggctaaggcgattgtcatcacgttagggactctcgaccgagtccgatgacgaagctgttgtgatctcgatcaaggagaccccctcggtttcggctactcctagcgtaaccgcgaccccctcttcggctcctaaagctcccatcagcttcgcgtccatcgctagcaagacttcgtccgaagcccctatgatggttgcatcccaggcttagatcccgacctgctttggccgagcaaccaaaaggtgcaactctcgtcatgccaatgcctgcctttccccacctggtctgaaacaccaatctacctagcaccacctcttgccgttttcctcaggtcccgccgtcacttccgtttcagcatttcaataacaatcacccgtgcttccgccgggcacatgcgctctatcgccgacagtgtttctgcactaccatggacgggcacgaccttcaccttcatcattgctttccatcgggactcgacgccgcactcccgtcgatcttgatcgagaggtgaaaatctcggacgccgcctttctttcactactttcccttctctttccgttgcatatatgttgctacattctcttgcatgtatttcagtctcggctcctcgtgttgtcattccggttcggtcaatgtgcttctctgcgatgacattgactttttgtacaaactctgccccttgctcggggcgcgatcgggaggttcttcagcttgatcacgggcgtatccttcgcgcgactgaacgggcgatcgctctttcgtcctcaaaatcgagcatatcaccactctgtacctgctaatttaccgtagaactaagtccaggtctttgatagacaagaccggtgcttacttttggaaggatttgtttcgcctcgagtaaaggagcgaatcgggttccaaaggctcgaggcgagctcgctcgactctttcgtcatttcgactttctcaagctatgttcggactcgagactctgcccggtttggaagatcaggacttgcttgcgttgcaaaaaggtgggtcggccaggcaatcgaacgttcactatcgaatcagagctctgatgagagacgcctttcatgaacagccgatttcatagaagcatctgaggtcatcactgctgctccgcaggatgtgctcaaacgattgaagctgtccgacattcagcaggtcaatcgactgacacaaacgatatgtcaggatgtagcgcccaactctaagcctctcagtgacatggtagaccgagatgagacgaattggataacgacgggagatcctgaagtagacaggcttctaggtggagggatcaggacgggagtcatcactgaggtgtgcggggaaaggtaagcaagcatctgaacctctcggacgacgccgtaccagccagactgagctctctttgcagcgcttctgggaaaagccatctgggtctgcagctctgtgttgcagggcagcgacctgagtcccctgagacgccgccttcaggtgcgattttgcttacatcggaacggaaagtctccttttcacgattggaggagcttgctcgccatatcggtatccagacggacgaaggagctggcaaactcgccgccaagacgttactcgacaatgtacatacgctacacatcacagaggtggacggcctggaccacgccctcgcctacatcataccagctatgatatcccgcatttcatcgaaggggaagagtgataggtcacttcccatccgtctgcttgtcatcgattccatcggcgcgctcttccggtcatctttcgagacgggatattctggtttgacacaacgaagccgtatgctgtgcttaatcgccgacaagctcaaattattggccgagactcaaaacatggccatcgttgtgatcaaccaggtgacagacgtcttccagttcagcgcaggaccgtccgtcgtcctttctaggcccgactcgccgtcgcctcataatctacctccgtcgagttcagccacacatgacgtctcaaataccatcccggacgatgccccgccgacacagacctcggatcagcctacgatgacctacaagcgacagtctcgatatttttctggtcaatcgcaatcatattcgaaagaagcatccctaggtctcgtctgggccaacgcggtcaatgtcagaataatgctctcccggacaggcagaaggaggctgctcgacccagacgacttgggacggaagagggtccgaatggcggcgtatgacagggaagtccagcacgaacaaggtctcgtcaaagaagatacctttgagcccaccctcattcgacggatgcatctggttttctcgcccttcgcaagacaagacatgctcgactatgtcatcctccagtccggcatacactcggtaccagctcgcagaaaggttgcggacgaggacacaggcggtgtacttcacactcgtggtgaagctacaggctctgctgaaagcttccaagacgatcttgtctttgacgatttcacgaacctaccgccagacttttgggatgaagccaaagccccgccttgatgagtgtaagcgcaatcttcaggttggttcaagataacgaaccataacgaacgcatctcggcatgccttcccagaggcaatttaacgatcttctgtaaatgattaacgatgtggctggcgcagcgatgatgaccaaactataatatacagattatggaagaaacaagggtgataaagatacgaaatcaaacaagcgctacgaacggcgatacaatcggcaacagccacactaggaactcctgatgatttacgatcgaacggcagctagacatgatggcaagacttatttgtctgctgatgatttggtgctagccggacgggtcgtgagacttccaaacatgctgttcagatcgtcctcttgtacggtcatcttgaacatcaagcgtactgaaccgcgtcgaatataggtgggcgggtcagtgtccggaaaccatcaacctgacgagactttacctcagttctgcttaccttggttgaggaaccatagcatcatcgatttctggtgtccccgctcttcctgcgctcgtgcagccaaggtattgataccgggtagggctggaaccatccgtgcgactgcagatcatcgacgataagccgctatggtcagccttcctcgagtcagtgttcgatgtgataggtcactcacctgtgaacttgccgtcaggcccttcttcatggaggatgatcgtgtacaccttttcagggttgttcgggtcgatcttggtgtattgacacatacagtatccgtctggacgtggtcgcggcgggtcagtgccgtaacagcttcgacacatcatcatactcactactacgtgataagtctagtcccagcaggtcgacgatttttgacagatcccgctcgtccttgctcatattgtcccgcaaagtctgactctgcttggtcttggctagaagtcacaacaacgtcgtaagcttcggttccacgaaaaagcttgaaatccatgagcatatttgacactgactctcttgaatcgtagcgatctctcgcagcagtttcgtatgcgtcgactcggcctctgcgatctggaccttctgcttgtcgagctgcgcacccagggcggtgagcgtttgcgtcttttcctggatcgcctgacgttccgcctcgagtgctgtaaggtatacatgacgggtcagaatattgcagatgactgattttcaggctgaaatccgctaaggagaccgtacctgcgcacatcctcgtttctttctccttctcggccttgatcaggtcttccagctgcgccttgttgacatcgaaatctttgaccttgtcggcatgctgatttgaagccgctgccaacctgcccttcatcgcttcggtataactatccagctacagatccagtatcagtatcacggtatcttgccaagtcaagaaggttggagctcaccgctaggaggaagctgtccatcttgaacttgaatggttcccactgcagatcgatcggcatgtcatgttgagccatcgtgcgagctaaattagtcctttgagagctgtgttctaggtataaatccggatcaggccagtcctatcaatttgttcttcttacaagcgaggctcgagctgccttggtatctccagtccaggaaacttatgcagatcccgctaccataatacaagcaccaagaccgaggtcgagaggttacggttgttgttgatgcatttgtttacaaactataaaaacggatattcgctttgaaatcgaaaggttctcgggacttttcagcttcagcgcgcatcgccgaagttgcgtacggggatgtcgacacatgatcagattattggttcttctcgagatgggataatgaccgatgatcgttcggcagaaggtatcaaagactaccccatgcgaaaaccaatagagacgtaaactctctgatggtcaaaataccaagtctcggtactttagcagctaccagtatactgccggaactccggtcgtacgggagaagcttgacgacaaatcctcctattcagcaccgtagacagggcaaggaaccctactcatattactggacgacctactttctcgctcacgatccgattcctcaaccgacactcctctcgatcgatcacccgactgcagttttgcataatctggtcgcgaagtggcattgcatcaagcatgagtatgttcccaagccgtcgaagagaggcgcagcgtcgagacctttatcattaccgggcgaggagaaacgtgcaacatttgatgctgtcaggaaaaagcgaacagctgctctcaagctatatcggcgtctagatcgctcagaggcggatcagtaccttcgagctttggagcaatcaccattgcgtgtatggaaaaggccttcctctccagcccgaccagcgggcgtaacagaagagctggttcggctgctagagaagcctgagtatcggcagcagtggcatctacagcggctgcaagagaccgattccgtaataacggagccacagacgataacatctaatatacaagatatcgacgacgggagttacaagctggtcaagggttaccgattcgataaaatggccatcgcttcgaacttcatgagactagcttgccgtgtgatggactttcacgacgtgagtgagcaaagccttcacacgcagcctttcatagcttactcggctcccataacactcatgttctcacagcatcatccgcaactgctcatgcaattcctgcccgacgcccggatgttcgaagtcaagattagtacttggacccataccccacggatgctgccagaacccagtgctgctccatctgacgccgccgtcttggactctgaattcgacagggtcacatgtctagatcagcaaaagcagacgacactttccgagacccagccgaagatccgaaagacgatcccggcccggcctgggctgacgcggaaagatttcttgctcgcctgggagttggacgaggctgaaaaccagacgaggatcaggacgatgtcggtcactcataaaagggaaaaatgggctaccaaggtcgctgcaaaggaaggatctgagctcccgaacccagtcgctttgactaaagctggagggtcgggctccgaacaactagataggggcgatctggaggaggataagggcgaactcaaacatcaggagctcagcgaaaagtcagaattggctgcgaagcgcatcgcatagtcgataggttggctccacacgggatggagccttaagcgttccaggcgtggggcaaggcagcaagttaagctacgacaggctatacgagcagggatgacatagttgttgttcacatcgaataacccagatttcctagtacatatacgcgtattcggttacaagtttggacaggaaaccctttttgcctttcgcagaaaaccaagatcatacgacccattttcatacagcctcttttctctctgatcgactgatttatcgagtcaatcggaagtcgagcctgttcgagccctccttttcacgggcggtgatgtcctcctggtaagcccacttctcttcggcagtcatggcgctccaaatcttctccttctggttgttctgtgtgacgggcatgatgttggctaagtcttgcggactactggtggtcggacttcaaacttacgaggtagccaaagtaccagcgggtgatggcgaacgttatcaaagcgagtccacagatgctgaccagaatcttgtttccacggtggtaataaggcgcatctattatgcaaggcgacttgtcagaacgagtttcggattgaggaacaatgcgcatcgcgcttaccgtctttgcgatagatctgactcgatacaactgaaccgatttggaccactacgttatagccagtgatctgcatggaacgacgcttggtcgagaaactgttctccgagatagtactagtaaggatagggtggaagtaggggtctataaggattcaaatttagcacggaacgaaagtcagaacgagctgggatctactcacaaccggcaatgagggtgaccatggagaacctggcccattcacggccgccatcgggcaaagtgttcatggcaatgaggataggcatcgcccagaactcgccgaacatgcaatggctatacgaaaacacgtatggttaggatggtatttcaggtgtgcgtggcccgtggcgccgaggtcagctcactagagtcgctcgttgaagtggttgctcgaccaagaaatcgccaacatagtcacaatttgcaaggcagccgagggtacctgagttatgggtaagtagagatggcgtgagctttgtgtacggctggatgggtagggcagagcatggaaacttacggtaagcatctgaatcggggttgaaacaaggagagaatatcgttagtcagaccgatacacgccaatcagaatcgagattgtatttacgttgctgtataagaaatggatcagtataatagcttgacggatattgtgaagggcatctaacttacctgttgaaagtggtaaagcccaactgcttgaggttgtaggtcaagtatccctgaacggggctctggtttgaagagacagctgcggtcagctttatggtctcgagctgtataggcgaatgcaggcttacctggggaatgtacgcgatgagcccaaggaagatcaagggccacaagtgtcggtcggacagcgcgtccttgatgtccgcaaagctgatcttgttgtgaagggcggtcaatcccttggcgggatcgtcccgaaggacccggttgatcatgatcttctcctcacgctcggtgaaccaaggcttgcggaagaaaacaccggtggttttggtagggctttcgggcaaccagcagtaggcaaagatagcaatggcacaggtcaaggctccttcgagagcctgaaaaaagagtcagcgtcagtgtttaaggccccgaattgtctctgacgaggggcctactcacgaatagccagaaccaaccaggcctgccagcgatacccctcatctgaaggataccagcggcgagcaaagccgagcagactcgagccacattgagggtcgaccagaaccagcagagtctgattgccagttctttactagtgtaaaagtgactcgtcatgacgacggctccaggaatgaaaccggattcgcaagctggattgttgggaccccaagtcagcagccgaacgcatgcaaccgcgaaatcgactaacctccaatcaggagtcgcgtaatgtaaaagccagcacggttggtcatgaagcattggaaaagactgacaagcccctgtgtagatgtacggaatatgttcagccgcctgtctgcaatcagtcaagaccacagcgcagtacacatacccagagcatcatcctgcggagcgtaagaaggcagaatgtcagttggccatcattgtgcggatcatgcgagaaactaacaagaagggcagccatctcttgaaaccgacccgagcacagacgatctgtcgcgagtggcatagagtttgagccatcgtccactttcggccggagccccggatatcacgtacctgggaagggaactcgaacgacaagaaagcgaggagctgaagagtagtaccgttgttgtaatcgttctaagaagggtgatatggcgtaagcatcaatttaatccgctgccatgcctcagctctactcacctgcgtcagtccaaggtccttgagtaggttgtcggccagagctatgtgtcacgtgacgttagtcacgacctaacctggaatcattctcgcctgcacacaccgttagagacgtctatggtaaagcaaggcgagtcagttaaatgacctggaaacaattgagacacgaaggcactcacttccacggtccagttgcaaaccaaagaacatgaggcagatcacagctgatgaggcgagcgtgagcctggcagtagatgcgagtgttctcctcagtcgaatccactcacagagcaacatgaagtcagtcttgcgtcgtgctctcttttcttcagctggatcccaggtaaactcggggtcgaagtgtttggctccatagtagtcttcattactgttgagcgatcaatcagctgatcggattcgagcgacggtagatcgtcgaccaacttacggcacaatcttctcgtctgtaagcgatcaatcgggtgcgtcaacaactgatgatctagtgatctagtgatgaacctaatttatcgatccactcgatacgtacgaagattctctcttccaacgggcgcgtattcgtcttgggacaacgtaggcttgacatcaaaagctccttcctgagcgaggatgtcgtccttttccttatgggctagcgacatcttgaagcgggtgttctctgtgtgtctgtcttcgatgcgatgcagaagaccgatgaagcgtaaattgagctgcagtacaaacttcaattacagagtggaagacaggcagggtatatatgttcggaccacaacgtgaaccagatgactatagcgttcgcatgtacccgtcaccggtcacatcatctcactgagccaatcgatcacgcaggaaaacagatttgtccggttagtcggaacagttgcaatccaagaaccccgattgccaaggtcagcagcagggccccacactttgagcaaagtagccgtggtggatgatgcaagatggtgcaaaagtctgtagaagccgctcgcttataagccgcctagcaccgcgtgctcctacgaccgtgcgtacgcgcgtggttgaccaatcacaagcgaacagctccgcgcaagtccgggaccgagcgatcgtcgcgccgcccagagcgacattacatccggacaggccctgaatcatgattctatagtagctggcacatgaccatctacgattttgaatccatatattgatggctatacggccttctacccggtctggttacaaaatgagaccggccgccaaagtcgccgtaccgtgcgatcatgcaaagatgctcaaccgagggtcaaaagccttggggtctccgaatcggaatctcctgttcaaagccgagatctcgtcaatgtcctcttgagccaagtcgaagtcggtgctgttaaggttctcggccatcctctcgggcttgacgcttttgggaatgacaatgaagcctcgctgagtggcccatcgtaagaggacttgaccgggcgttcggctatgtttgctggcaatcttggtcacagccgggtgcgtaaacaagggatctacctgcttgacagtggggacgtcaagctcgacccagctgcgaaactcaagtcagctttgcagagataccgatgacctatcagccatgctttacctggcaggtccgaacgagcagaatgccatcatcttgatgtcaaatgccttgcaaagctgcaattggtcctcctgagtgttgtaagggtgcatctcgacctggtgaaccgaaggagggattctagcatacgtcatgaggtccatcaacagggctccggggaaggagcagactccgaggtttcggacgagcttttggtcgaccagcttctccattgcgggccaggtcaagtgaaggggagatcgttcagttacgatatcggatttgccatcagcgaaccactcgggagggtatcgagtggagggatcaactgagaagaccgtatggagatcagaatcgactggcagcgctcatcgcaatcgcctataagacacttaccgtattgtagggcgatggggaagtgaatcaagtagctggtttggaaatgctgttggtgtccgagcaagtgaaagtagcggaagaaagatgcttacagatcgaaatactcggtctgccagttcgcaagctgtctcctgcactctggctcgacgttctccgctttctatacggtttaaggtggtgtttcgatcagtgtccgatccacgtgaagtgcatcatgacggtgcagtcttactttgaaagtgttccacaatttggtaacaatgaagacatcctcccgtttgaccaagccctcatcgatggctcgcttgagacccttcccggactcgtgctcgttggcgtaatcgctcgacgagtcgaacatcctgtaccccgccttgatggcttggtagacagactcggcacaggcattctcagggaccttccagagaccctggtagatcgcgaaagtcggttagctttcactttcgagtagtttgtggaccaagatcgcgcaacatacggttccaacgataggcatcgcatcgccagtagttgagagcttgagagtagggacagaaacggatgacatgatggggaatgcttggaattttcgttacttgcttgtttgttggcttctcaatcgtgctcaagcgatggggttttacgagtagacacgactttgctggactttcagaagtaaaagtcaatcacggtttgcgcaacgtgaaatgtggacaggtgtctgttcacagctgctcgcagtcgctagtcttcgagatttcgttgaagccgctgttggtcccggacgactgatctccccgctggtcgcttgtaaccgaggtgacgaacgccatttctgcttccgaacacggctttatcccttttagaacggcctcatttgcctcgcgatttgatcatacggcgtttgacgtgatcggccggtttcatttgactatacggcgacgtccaatgtcccaagttgttcgttccgggtttgtcatgggagcatgtgatcacggcctttcctcgtcaaattaccgagagcattacccaccgcaatctgaattgaggcctgagtaaacggatgcgctcacttgcgaatcaaattattgcctgacatgtccgttccaggcaagaagccgacgcaggtcggagatcatcagatataagcatgatcgatttcgagttagcaagtattgatctagcaacgagatgtcgacatcagccaagctatcaaacaatctaccctctctatccaatacaatgaaccgaaccgaaactacaactcaggctccttacgccgtcctgaacttgcgaggacagggctccgaagaggacctgacgaaaaaccgcaatgagggaccgatgacttacaacggttctcttgagcagtatgaggtgagtcgggaggtcgacaaggtgattggaatcgtagctgatttctcctcttttgctgagcagcactttgatgtgacccctgtgatcgggcgagaattcgccaaggacttgcagcttgtcgacctcctcaaagccgaaaactcggaagacttgatccgcgatcttgctgtcctcagtaagtccaacgtggatgagcttattataccagtgcttatgaataccgctttagtctctcgccgaggtgtctgcttcttcagggatcaggaaatctctggagaacagctcatcgagcttggtcacaagatcggccaactctctggacgccctgccgcatcaggattgcacgtccaccccttgacggaagacacccctgaactaggcagtggagttctcgctgagatctcgagcgacaagcaaaagaagggcggtggtcttaggcaggctttcgatgacaagtcgacctacgcttgcaccggttggcagtatgtcgcatgcgttggaaaccaaaaactacaaaacgttgtggctgatatacggacatgcttctttcagctcggacatcacctttgaaaacaacccttcggactatgccgcgctcaaaatgcacactttgcccgaaaccggaggcgatactctgtggggaagcgcgtacgaggtgtttgaccgtatcagcccccctatccagcaattgttggaaggcttgaccgccacgcacgacgccaacttcttccacgatgaggcgaggcgattgggaattcctatcaaggctgttggacgtggtcaccctatgaaccagggagaggacctgcgggccgttcatcctgtgatcagaaccaaccctgttaccggatggaaaggactgtatgtcaactacgcctttaccaagaggattaacgatgtcactcgggacgaaaacgagtgagtcgggcttttcagtcatacgtgacgcatcatctaatagtacaaatcgtccttatagcttcttgatgaagtactgtcaagatctcttgaccaacaaccacgacctccaggttcgattccgatggaccaagaactccgttgccatctgggacaaccgaagcaccttccacacgtaagcctcatccggttccttctcgatcggaaaccgggcgcctaacgatgtattgtctttgacattctagtgctacgtacgattacgatgccaagcgggctggcgaccgtgtatgttcggtcggagagaagccctacctcgatcctaagagcatgagcaggaaagaagctttgaaggcagagggcaaggcttggtgaacaggccgtcgtcccagccggcttctcaagcttgtaatctaccatgaacaattctgtacaagctagaaccaaccctcgagttgttttttccagagtcgaaacactgtattgtaaatctcccacaaaagctatgcgatgctaccttaagaatatctcgagacgtattcatcataccattccacgatatcggtgtatttgaactctacagggcccttcgccgattatctgtatcttgtaattaaggcgtcatcgatttgagtacactggcagctaaacggatacagtagaacatcgacaactaaccgagccagactttgtggctgtagctcaagacgaaaagtcggacgatggctcgaacaagacctagctaaaaccgtggatacccacgctgaatagtacatttctccctcaaggtcgctcaagttcaaggcactctgggcgcgatcatgtctcggtagtatatgaagactccttcgactttcgctccgcctctacctttgcttttacctttgctgagtctgtaatcgcaccatgtatatcccagacgctcccttggtcccaagtcaatcgcacgattgtaaaagcgggtgtcgacgattctcccgtactttcgccttcaagtctaaccttgtcaggcgcaggagtgtactgcaactcaaccttgctgtcaagagagaagatgaaattccagcagtagtgccaggaccagcaatgtagtcggtcctgtcaggattcggatgatcaatctgcttcgcagcgcactactacaatcacgcactctgtcgatctttacacagtcgcccgtgttcttctgagatccgtggctgtctggaattatcatgatctgatacattcgttaaattcgaatcaggcagatcgctggtggcgggaacgagagatgactgactgaataggcatccacgattacagtgcctctaaacattcgctgttcattccctacttcggtcccggagggagggattacagagcaggaaactccttgaaagctttggctcggtccgtcgaccatcttccctatcgttgcaaaacccatcatcaggtctgatgacaagaaggctgcacgaggctcgtcacggttcaccttgcgagcgcacatagctagtttctctggagacttccagcatcttgatggaagaaaaccagccgggcatattgtatatgaaatctccgagtctttgataatgggacgccttgggcgtgatagcataactagatgatcgagctatacattcgacaacgtcaatcgttatagctcagaagtagtctgtgtgtatgccaagcctcggtcatggccatgggccggactccacatatgttcggcgccagccgttagcgcgcaatccctcggttggtggaatggccttgcgggtcgccgacgaagcaactaaaagacgagatgtcctcgcgagtccttgtccagtcgtccaggaccgggcaccgagctgtgaacaataccaggtcacgaagcatttcctatgtctgggatgttgatatcgacagcgtttaccttccgggagatgtccgctatcccggtgggaccggagcggaacggtatagccatgctcaagagtccgcgagcgaaaatacagatacgacttggagctgtatcaggagacgacagccgaggtataggtagcctcaggtaggaggcggggtcctttcactgtctgtcaaaccggcggttcaactttcgactgggtatcgacattgtagaggacgataagccgatggaagtggaaaatgatcgcctggatcttcgggaacgatcatgtcacggcacctcttgaggggagtctcgatgctcaaagtatcatgatgagaactagcagagctatctctgttccgaagactagaccacctaggaggacgacctgattcccgctcgtacggaagggtctcccgaagatcctctcgccattgggatcgatgacgtccgtcctgataccgtgtgcggcagcgtccgaaaaatccttgtcagatcggtatgagcgagtgtaggctatcaccaatagcagcagagcgagaatgatgaagacgatgccgagtgaataaaattgctggctgaatatctttctgcatgtccgggacgtccaggacgtctgatcagtcagtcttcagaggttcggtacgtaccggtcggtcagtgtacttacaggatggatgcagcataagtcagacacatcaacgctgtcctcgcataagctccatgaaatgtcctgtacctcgctcggagctcgatgacctcagcatcgtcgagcgcacggaaagacgatcgtcgatgacctctatagaggctcggcgcctggtgatgattgggtagtggccacattcgtctctcgagtatcgaaaactatatgggatctgagatacatacagcgagaaatcctcctgacatagataccggagttgcaggatgaccttgtgaagagtaggaccgtccgatatgtcaagatcaccagagtctgcttgcgtgcttcagggggggcctgacttgtatgtttcacgtgattgacgcgagtcgctcaccgacccccttagctgctgggcatcactcatcgcacttgagtatgaccccggccacgatcttgttcgaacgatgggatcgcttgcagtctgtctagtatctactaagattgaaacttgactacgccaacctcaaggcctagatattgtaggaatacactcacacaaaagcgcatcttcgacaaaatggcttctgctgcggacaaggaccccttctaccttcggtatgtcaaccgagatctagcgataccgatagacaccgtaactaattgtccatcctatacttttgcttgctcgacagttactagtacgctgctagctcattgaagtttggtcaatgaactatacttactcggaactccactcgcttttcacagcactggtcaccagggtatgcatggacacgagttcttggaattcgaatactctcaaggtgaatgacataccggcgacccgagcttgcaagactttcagtactaaggaactatcctcgatcacttacaggtcgtctccgatatgccaacaactcgaactaccgaaatgactctttgatccgtaaagagagtgcgtagatatgtcccaaatcgtaattccgcacggtgtcgctgactagctcgatcctatcttcccctaccgattcttgtctacaccaacccgtgacacttggattcgattcacgcgtcgcttttatggagaatagtgttcgtcggaccgctcgtcgtggaggagttcaagaggatcatccgggatagcgaagtgaccaagtgagtccgccttttctcgatgcgtgcgtctttcggatcaagggctcaccacctgggactcttcggcgtctgtagggaagacgactccgcctggccaaagaagaacatcgtcggcaagcaagagctggaagtgaggattgacaacgagcacatctcgttcgaggtgagccgaggtggtagacggctaggatgttttgcaaatggctgatacgatcctcccctcgggacgacgctctcgatagaccgccaagatcggatcgcttgcggacgtacaggactcgcaagatccagatggtctgagggtattctactacctcgtgcaggatctcaaggtgagtctcttacgtcctcaggagccccagacgatatcgtaccgagctgatccttggcaacacgaacccgtccgttccgacttccagtgcttcatcttctcattgatctcgctgcacttcaagatcaagcccagttcgtcatcccccctgacccggacgtctttgctttgaatcggtccgagctgacccagtcacgcttctcgcccttttttttcaatccagtccaataaaaaggaaagacggcccgaatccatatcggtcgcatagcttggtttcttctcatcattgtatagtctttcgtggtcactaggtatgcgaaatgcaaactagtcgcacgtcttcttcatcatcatgtacgcggtgccgggttcagccagacgacgaatccttgactcgcgccttgattccttctgtcgggcacggtagaggtcgagtatagaggtatgacttgtccggtataggaggatgtgaagaagaacaaggacgacgacaaagacgacccagacgccgggaccgaccgatccgatgtataagccaaatagaaaaccaaagtatgtatgtacaactggactggttcgtcccaaagatgttcccgtgaagtattttcagatcggctttttaccccatcgagatcccgttccacccttccccttgcgtacccggtgcgttgccgtgctggaccgagtcgagcggagcgatacgagatgcacgtgcccgctcagatggcctgggcgggaggaaggaaagaaggctagctggaggtggaggggaaggtctggccgtggtgaatgcgaatgatctggtagctcggggaaagactgagggaggagggtatgttatgagatgcagaggatgggtggtgcgaggtcgacgggggtcggtccgatcatgctcctcctctgtatgatcccgatgatgcgaaattataagcttctgctcgtacatcccggtagacgagcggtaatgaaggtacgtacaccaagatctggttactatgaggtgcgcgatcagagaaggcgaggaacagaaggacaaggcggatcagcaaatgaatcggatagggtgctccctccttccctcttctgatcacaggatgcgaccgagagcgtctcagcgacaagatgacttacatgggaatatgcacgagcttgacaaagtatccgatgaatcccatgacggcgaatccgacggctacggctcgacagagctggatgtattctatgagggcgcacgattcggttcgggtcagcccggacgtgggaggcgccggtacggcgcaaggccgaggggtctgggacttacccttctgcgtaggtttagtacatcggttgatgaactgttctcgccttatcgtcagttcaccgactcgctaccgtatgtatgcctcaaaagagccgggcgtgtgaacctacctgagttccatccttgacgaacttttgaggcacgtcggcaaagtctttgaccatgttttcagacattttgagaaggtggctaagtgcgattgtctgagcggttgatagaggtgatttgattgaaagatggaatgtcaaggctgcgttgtttctatacccaatcctacccataccattcatgaattggatgtcgaggtgtcacaccctcggtgatgggtgggtgtccctccagtggaatcgcgcgcgcgcgtgagaaagcgagaaatcgaaactcgagacagagatcaaccttagaccaactaccagctaccagggacctcgagacatgatggttcaacacggtatcatcgttcacacatacatcctcgtcgtcgtcgtcgtggattttcagtcagctgctagataacagccccgtgagagtatcatatagattcaggagaccagcccgttcccatcatggtgagtccatacgtagcctattcatcacggtcatcggctcgcaaggtcgcaatgggtgtttgagctcgcatctcgcgatatattggagagcagacaagctggtcagatgcgggaaggaaaggcagagaaaggatcacagtatattggcagtaggagcaacttccaggatgattcggctggacctcctggacgatcctattcaacagagccagatagctaactctctattcgttcatgtgatccctcccggtccgctcgatctcatagcctcgtaagcattctttccaggaccggatcccagtcgatactacacattagatgaaagctcacctcgtctgatatctttccatgcgaatcacagccccaaaagcccgcgcgagcaagatgctcaacctcgtcaactaccgactcaaggtcaccctgttcgtccctctcccgcgagccatgtcataccctgccccaacgtccgagtcgctcatgatcaacccgtcacttttgttttggtcaatctcgctaggaatgacgggagacagttgatcggtcagatgttggctttcgacaagcacatgaacatggtgttgtccgagtgtgaagagtttaggcgggtcaaggtgaggaactcgtcttccatcctctgccgtcccttcaaatcgaccatcgatgctgattaccaaacttgatcgtacatgctcctcattcgaccccaatcgcaatgcagggaaagaagtcaaagacctcgacagaccctaaggagtctgccccagaggtcgagcagaaacgaaccctcggtctggtcatcctacgtggagagaccatcgtctcggtctcggtcgacggaccaccgccaaacaaggaggacggaccggggatgatggctggacctggaaagggagtcgccgcgggacgtgggatgcccttgatgccccctggtgagtaacccgggattcgtcgcaacggccgtcgtgagggtcgaaactcggcaaagaagctcatcgaaatcgtctacccttgatagctggtggaatctcggctcgaccgatgccttatgctcgacctcccgccgggttcccccctggtatgatgcctcccggtttccctggcgctcccgctgggtgagttgccgctcgccgatcgcgatcgaagaatttgtccaggcagaatcgagcgctcatctcgctcctccgctcgatcacagtatgccccccggtttccctcctcagggtatgcccccaggtttcaggcccggtatgcctcctaccggattccctcctcagggaatgcctcctgggtgagtccaagggcttgttcagatcggctcgtgcccagcgcggtagctgacccactctgcacccacctcgcagtttccctatgaggcctcctcaatagatggtcacacccttactctcaaaagaaacccacggcacctcacccttcgataaccctcctcgtatcctttggctttctccaacccttctactgccaccccttcccttccttttcctccccccctatcgaccttggtcacgacatgcatcattatagcttgttttgtaacgaaaatcagatacagaattactttcgaccatggtccgccgtcttgattgaagtcgattcaagcaggtagatcagataacggacggctgcgattgggtggggaaggtgttcatgacaggggtacgccgttccattgtcatcggcggagcgactctcaactgtccagccttgacagagctgggagctgaagtaaacaacgacggctgtgccggacggtctcaaacgcgatacatgcagcaaagcgtgtgataaggcctcgccactttaccagaatctaatcacatgaatctgcttattcagtggctccaagatgcaagatgacattgatgaaccagggtcccgcctggaggaacaagttgagcgttcctgcaagtttggcctccgcgctaccacggttccataggagacttgctagaatgagcaagcatgatgcatgtatggagacaattcggccaaacgatgtggttcgtgcggctgtgcgccgtggtcatttttgtaaacttgtgcttcaccggtcgtagatagtagctgcatagaggtggagtggcgctgtatccccgtcatgacgttttcgttgtcgcattcccatagtcagtatttgtagaggaatgcaagggcgagggcgaggcggaagacatcgaattgcaacttctgcagtggaccgcaacacctctaacagggtcgaggctgaatcaaaatgatggataagttcagaatggccaattgcgaaggatcactgctcttcaaacaacgtcgggtctggattagcaacgtagttttggcagatttatgtctgttccctctcgacggaatgggacggggatcggggcactcgctagtcgccagatttcagcgacaagccggtcgttatgtccttcgcatcgcaggcgacaccggaagctctgtcgaccttgaaggagtgacgccagaaacgaaagaaaagggaaagacaatgccatgttggtcgagcctgacgccagcattggggattccgtcaaacttatacaggcgtgggtatcgcaacaacccatccgataacgccttatccagctggtcgctgatattatcgaggccgctaacacatgtttatcgtttctcttccaagtatatctaggatctcgcctcagctcgtctcaccctcaacccgatatacaaactccttgccagtcattcgccgattatttccatttccggagcagctatctcctacttctgcttaggttggaagaccttggggttaccggggataggctcgtgctcgcagtcacagacctgacccttctcataaggggccaaagcctgctcgatgtggccgcctaaagaagcacgaagcgttaatcgaggttggatcgacagcgagatccggttgtggaaaccgcgacttaccgcatccccaccaagtgtacttggtgtcctcggggtggttggggcattcgatggctttacacatggtcttgtatgaggttgaagatagttattttatgactgtccaagctctgctgtaatgtgacacagattgccgttcaatcggtcggctccttgactatcaagacgccgtcgaccccctggatgatgctcgatcgccggagatcgaggtggaaacaaaaatggccaaaagacgaaatctcggtttgcgccactctcctgttcctctttcaagtagcgcacccctcaaagcttagttgtccaaaccgcatacttgctcattgctgcgggcaatgatggcagtatccttcgccttcagcgcagtgcctctgtaccatatgaataccaaacgacagtaacagagtatatgtgcatacgatcgatgttgtgcaggtaatacattgggcgggcgaaaaggcctcgtgtggtgtgtgattctgtctgattgaagcgtgatatacatttgatccaactcatgtggtcgccgattgttgcaagacttgggcgccattgctacctttggcctgttcgggatgacgggcgatttccgcctgatcggccattccgagctcctcggcgcgtggtcgaagcccttctgcgtcatcgacagccatgttctgtcctggcgtggacgaacgttgcctcgcgatctgagcgatggcttcgaccccttccataccaatcttgctgtcctcctcggcgtagattcgctgctgctgggatgaacacccgctcccgtgagcgtatgtcatgagcggattgccagtctctcgctctgctttccccgtgggccagacactgtgcttgaaaaagttggtcggatcgtacttgttcttgatctcgacgagacggtcaaagttttcgccataagtgcccttgacggcgtcggggtgagacgattgcaggaactgatgtaggagcaagcggtcaatcggggagtggcggaaacccggctatgcgaccctgagactcacgcatgggagcggtccacctggcgacgccgggtgaatgatcttgtcaatccaatcgatcgccgtagtgacgcacttgacgtcctccttgggcacgtcgatgggccattggtgcagagcggcgatggtgtacgaagcctctcggtgcgaggccggaagacaggtcgtcttgcaatccgtcagggcgccgccactgagctcgaacagccaggtacatccatccggaaccgtgtggaacagttggcacgtcttccaaatcgtctcatcagagagcgcatcgacgaggtcgcttttgataaacctgcggttgacaatgtcagtagcgtgctcagattgcttggactatttaaccagcgtgagactaaccacttgcgaccggctccacccttgagcacgttggcgatcgaatcttgctgctcgataaagctcctttccctaacatccttgaacagacatcgctcttcattccagctcgctatcgccgacagatattcggcaccttgagcctggctaccgatgtagcacatctgaatgatgacgacacctgccagagcgatgggtccggcggtgaggatgatgttgcaatagagattacggggcgaccctttgatgcagtcccggacgtgctggataaggccaggggcggtgagaggattgaaggggctaaagaggcagtgaagaccacatgtgagcacgaaatagactaaacgtcgtatgctggtggctactcacaagatcagattaccagcaaagacgacgggaatgtggtaagccttggccctataccgcgtcgccaccccgagcgtcgtgcccgcgcccctgatggcccaccacagctcttccgcctcttcggcgctcatatctcccttgctcccatcgggcatttcgacgcctagacacttcccaatctcgttgcgttccccttcttcaagactctctctaccgagccagacgatcctaccatcagccatgacaaactcgacctcggtcaggttgtccatgctgagcccgtgcagacgactgagaaagccgaaccctcccgacatcatgacggccgatccgacggggaacgccgcgagcgggacgtggtaagcgccaaagggggaaacgtgcgtgacgcgatcgatatcctttgccctggctccggcgtcaaaggtgacgagcgtgtagggcggttgattcggtgttcccgccatcgaggttgatgtagacggggacgagctcgattgccccggttgcgcgtgttgctgttgctgctgctgcatgttgaagggattgttactggcttgtataccgtcgggggagatggtcagcccttgaccgaattgccacctccgatcccccatcccgtatggaatctcggcgctctgagcaccaaagctcaagcttggtccgggcaaggtggcgatcgggaacttgaacggggaggcggcgaagtcctgcgattgtcgatgtgatgacgattgtccggtcattgaagaagaagggtgttgtgaaaactgctgcgaagtatagaattcgggctggacggcggcgctggaatcgggattgtactcggtcggtccggcgagagcgtccatcaagctcttcttgctcgcctcgtccaacttgccatcgaccatgttggcggtcccgctcgccacgggagtcgtccccatacccggtgcgctgccgttacttcccgcactctcccttctccattccgtcacggcctcgtcgttgtgggccatcaacatcgagacgctcatcgtggtcggatccatagtcatcatccccatcccgaacccatcctcggctacggaacgtttcctcgccgtcgccgtggacgatccggaccctgagcctgacccggaagccgagttggacgacccggtccctgcgcctacgggcggacgtcgactacccagggtggacgaggacgagacggtcgtcccgcctgcgtacatcgactgtctctccataccggccatgtccccttcgtaagcgtcgtccaaagatcgtttgcctcctcccgcgtaaaacaagccgtcctcgcgacccccgagcaaggagaccgagccttccctgtctttacccttgatcgacctggaccccgagatcgaaccccatctcgagttcgagttcgacctggaccccgaagctccggaagtggaccctccactgccgctcccgctcccgctctcggcgacggaccctccaccctgctctcgacgtctgggccaattgatctccctcaagctcctccacgaggggtccaacaggggtggtaatgccgtccgcacgctgtccatcagggagagatcgaggatgatctgaccggcgacggaccatccgtgggtcccgtatcctccagctttgatcgagaggtccaggtcgtgtgctcgacaaaagaggatcaggctgggagaacgatatttccatcaaggcggacgacgaggacgaggatgatgatggatgagcgacccatgcggaactggacccgactggggaaagggcacacattcgacactcaccggctgacctgcctagcgcacctcggtcggacgagacaactagccccgctcctgaccaccccgttgaagacggtcgcatgcctcctgaacccttcctctccaaactcccagacctcgggttcatcctcgtcctcgtcttccaccattccttgctctcgctcttcctcgccttccttcctcgccgacgtgcccgtgggtttcccatccctgttcttcctcagggcgtcgtagagacgccgcaagacctcgggcgtcaacctatgcgcctcgttctccttgtgactcgtcggcgggatggtcggtgtagatgatttcaacgaatccatcggtgcggacggtctcagagaagggttggggtcgagctcgttgagcatggatcgtgatttcgtgcgttcttgttggacgatcttggcagggaaggaagggggaggtggtgccgcggcggccggggtggaagtgtgctcgtcgtacatgtgttgctgattgttgggagggaccatcttgtgagcgatattgaaatgctcgaaggacgtcgataccgtcgtaggtcgagagtcgagtactttgatgggggatgttccgatcttgcagtcgaatgtcgagtcgtgctcgtcgatcaccaggtcgtcctccagacagacgacgacgacgacgacgacgacgacgacgacgacgatgatgatgatgatgatgatgttgggagttttgctcctatcctcgagtttaggtaggaggtgggtaggtgtgactgcgggttgattatggtaatcaccctcaggtcaccgagagaaggataaattgcgaggatttgacgcaagacctcctttaggggcgggcgggcggtggtgatggtcttgtggtctgaggttcaatcgaatgcgaggaaacgacaatctgagacaacgaccgtgctctggcaatatggtacgtgctatgtagatggagtatgatgtcgactccaattgactctgcttccgagtcgcacaagtggtcgcctctttcccaatcctctattctgtctaggtaggtagaggtagagtgcggtaaagtggtcctctctggtcctgcgacgacgattgaattatggcgcgcaacggataaagtcgggcaatggcagaaacgcagagagaggcgacgaaaggggaacggacgagcggatgcaaaggaatggggcaaaccgaaaggcaaaggctcgcgaggtttttttcggtttggtaaacacgagggtggaggggggcatgggaattgatcctcgtacgtactcgagctggacaatatgagagcacgtaccgcagccacggaggagacggggaagagtggaatgggatccacctcgccgcctcttgggtgctggtcgaattgaggtcgtcgctgacatttttctctttcccctcttagtccccccccccccagggcacaatcggcaaccggagatgacgtacgtcatttgatctcgttcggctcgtctcgtctcgtctcgtctcgcgtctcggttcgtctcttgcgcgctcgcgccccccttgacggtcaaaggggatcaaagttgggttgatgatgtctgctgcctgctgcgaatcatgccggcatctcatgacgaaggggggcaacgccacaacgacgttacatgtaccgcggatacatgaatagttggctacctgcctagctagctaccaagctatcgtcgtcccaacccttcgcgtcctttgaaccgccaatcgatgatctcgtattcaaaccatctagtagctagcacctgagcacctagtgatcggccgacatcgtctcatttcatccacctcgatcgaaagaacgtctggacacacacagatctcacattcgaactgcagtcgattcgtcacgtttcaatcatggcatccagaacttccatcaccaacgtgctcaggcaggcggccgtgcgtcccatgaggtccgccatcgtagcccggggtatccgatccagcgccatcgtcaacatgcgtgagtaaaacgacattcgatcgaatgatgggtactcttcgtgacaataccaagaatacacccacttacacattcgcgacctttagccgacgtgcctcaaggatcggttcctcccttccctgaaaagctgcctcccaaccctgctacccactcggcacccctttcctcgcccttgcacacgtacggtcaataccttaccacctgtctgcctaaatacgttcagcaattctccatctacaaggatgaactcaccctctacaccgccccctcgggcgtccttcccgtgctccaattcctgcgtgatcaccaccgcacccagtacaagtcgatcatggacattaccgccgtcgatgtccccacccgatcgcacaggttcgaagtcgtctaccacctgctcagctacgctcataacagcagaatcagggtcaagacgtacgccgacgagatcacgcccgtcccttcggctacgggattgttcaggggagcggattggtacgaacgagaggtctgggacatgtttggcgtcttcttctcgggtcacccggatctgtgagtgatacgtctggtggactaagaccgcgtgtgtatcatgtcactgagatcgtgcttcacgactcgtccatatcattccagccgaagaatcttgaccgactacggtttcgaaggtcaccctttgcgaaaagacttcccccttaccgtgagcaaactggccatccccgtcaagtcattatatcctcagcttacatcctcttgaaatgcatacgataaacatgaccagggctacaccgaagtccgatacgacgaggagaagaagcgagtcgtttacgagcctcttcagctcacccaggcgttccgaaactttggagatgcttcgagcccctggggtcagcacgaacagggtgtcgactacgttcctaccgtgagtgcccgagtttctacctggcagcgccgcatcttcctgccagctcagaaatcaagcaccgactcgccttcttgccgcttgacgaacgtacacagaactttaaaatccccccaccgcccaaggaggagaagaaggacgagaaaaagtagaaggtcacaatctgtcagcttgtggtgtaatgtttccgaatgcgatcaatggagatggaagcgtacgaatgacgcagagatgccttgacgagcgatccactcactttggggctagatagaagggtcgatcctttgagcatgtctgctccacggcgatcttgttggttggaactgcaacgcgaacctttggcgaagcggtcacagatgggacctgaaagacagtcgaagggggaatgctcggtttccgcttcctttttccagactctcggctcataataaagctgccagcgcgatctcacgacagccgaggtggtctcgacaacagccagagcagtctcactcagaggagcgtggcactcgtcggcatcggtctgacgtatgtcatgatggtctgtcgctgacactcctgttgtctttactgtcgactgagagaggtcggacattgcgccaggaagagggatcgaggaagcgatggtcctgatcggaacagggagatgtttgggatcggcactattgaggttgacccgatgtgggacaggtacatgatggacatttcaggtctttgtgcggttgtcagacttgcagcctgctatatgctactgtctccctactctactcccattaggttgatgacgtcgcaaagatgttgaaggcgacaattattaaacacgtatacacgcattcggcaaggtgatgaagatcgcgctgttcgccggaatgaacgggatcggtggcatcgctgagggtcctcagtgatcgtggatatgtcattgctgacctcggggtagtaaccgattgcacaggtcgtcgggaagcatccgagcgacggttcaaggcagctatttagattacggtcgtgccagacatgaccacgagcgggtccgacatgatgtcgagatggttcaggctggagatcggtaggacactgcgattggagatgatttgtacaagtttcaaacgagcacttctctcaattgtctctcagcgtccatctgcgaccgcttcgccataagctcgtgctgtttggcggccatccggaggttcgaactgctcgctctagcgcgagagccgatagcactcggagatcgaagtttgctcttcgtgcgagcgggactgagcataacgctcgtcttcgtaactgtcttctctaagaagggcaatcgctctttgttaatgctaattcgacttttaagaggcgagcgacgggaatgtacgctgcttccccgtggcaccggcttgccaggcttttccgggagctgttcatgtcgccacgtggacgtccttgttgacaagacaggcaatgttgtcgactgttcccggctgggcgcgccttgtacccttgacgaagtgttgcttatcacatcgttcgcaggcctagtctttgctgataccgatcggatctttccttcttgagcgagcatcgctgatgtgccaaacgtagaaccgtggagaacgacgctcggagtccgaagtcgggttgtttgagccgtaccacgactgttgctaggcgagatggatatgtgtgactgtagaccagtggtcgccctagctgtcgggtgagaacgtgtgcccaactccgacagtgcatgtggaggaggtggaggcggtctgctactcttcgcatagctgcgattctgcgacgatcgcccatcgtgtcgactcatagttgagtgttgtggaagtaacgacggtctccgagactggtcagcggatgcgacccttccgagagtgttcgacggttgagtgccgactcttgtcaggctggcgtctggcccgacggagaatcgcttcttaacagacatgacagtatttctggggccttgcgtgagtgcggtgacagctccgaacccgctggaaattctcgctcgccctgccaaaatattgtctgtcagcttaccgaagagtggatctagtaaactgcacgaaatcttacccccgttcctctcatcggcagccgcagatcgatcgacacgcattctcttgatacgagggctgtcttccgcatcttccacgcgatcgagtcggcgtgtcttgtcttcccggcccggcagcacagcagatctggcatgtctcaagggcatcccattaggagccgacggagtgaattcggcagaagctttgcgtttggccgatcgtaagggctgcgtgtgattctgtggaagcccattttgagctggacggcgaccggggtaatacgctttgagctccgccattctgattgcagacagaatttagtatacgtttttgtccagctgactttgcgaacaaaagatgacctactttgagaattccttccgatgcgcctggtcgtacctatcagaaactgctcgattatccgtaccgtgtgcgctcggtccgaccggcacctcgcagcccagcggcgttcgcgacaatgtcgacctcctgatacccgctattcctctgtcttgtaacttggcattgatctcctgaagaaggtcttccccagctttcgcgaaatgatcgttggaaacgccgtgagcgaatgaaccgaactggaaatggtctccttgcgcctcgtgtctcagtacggacgagatggattcttgaggatacgatccgggcacacaaaacgagggatccgtgggactgaaggcagcacggacggcagcagacatgttgcctttgctggcgtgaacctcttcatccaacagcaattcctgttcttcttccgactccagtgcaggttcgactccagtttcattgtcaaggaaagaactcatcccggtaaaatcctcggcaagggtgctttggcgaagaggaggaagcatgctaggagcgggcgggctaggactcctcgacatctcgtcggtcatgttatccgttggcagacccatcaaccacgccgcctcaggtacctctcgaatactggatgcttccgccgagctcagtctctcgggggccgacgaacccacgatccggatggtgcttcctctgttgacattgatcctgtgagaatgtctttgcggaacaccgactacgagatcggtaccaggtgacgggacagctcgattgcggtacagtgggggcgaatacggcaggtagcgcgttgatccaggagaaggctgaacaaaggggctcgaccgctttcttgcgtgcgtcttcttgacttcgatcatgcttttcgctcggttgagaacggtttgagaagtccgtttcgccggctttgcggcctgattatcggcctgttcgtcttgcggaagaatgggaactcgtctgcttcgaaacttggtcggcaacgaaaaggaagccgtcatcgctctgagggattcgaaagattttctggtgaggctcgtggttcgtttgtggtcgatggccgctgtcattgcgcaacatctgtcaacactcgtcttgatcgtattcgaatcgactccaaggacccgttcaccttttctgctcgtcattgaaccgaaatctggcatcccctcctcctcggtcgtgttacggggatcagacccgccgttttcagccgatttccagcttttcagagtgtcgtatctcccctcctgctcctcctgtctatcatcggtagctctcgcatacgaccctggaatactccttccgagtctcgtggcttcgtccagatcaactgacgcacagccccgatcacgcgtctcaaagctggcccgccggtcgcttaggacttcccaggccgaatcatcttgatccgcgtcgacctgcattctttgtgtcttgtcgaggacattctgcgcaggtcggtcttggtacctttggggcaggatcccttgtacgtaggctgaagactgctgactaagttcaaagggcccttctctcttgctacgacgatcagaaccgaacggattccacggcgagggagagcgagactgggaggagcgtgatgatcttctttgctgtaaatgcgggcgttgcgatctcaggacctctatgtcgcccctgtcttgcgtggtattcgccttttcaaacgcgttcagacgtcgcccatctgtcgaagacgcatttaaaggaaaggatgtctttagtaaaggatgccaggttgtgcatgttgaatgaccgtctcacaatcttgcaaacgttggaccaaatcggaaggctgtcaagatggcacattcaggttctaaatagcagcgccttgacaaacaacaaggcttcgggacctacttttccgccagtcttgaggtcgtatctctcacacaaggtgtgtagttggattttcgttagagcgttaagagctgcctcgctgttcaaggtggactgtcagtattgacgacatggcttcgattgcggtcaaagggagtttagcggcatcgtcacacatactgataaagaatctcgtctgccatatttggcatgcgttggtcgtgaaagcttgtagtctggattgtgatcgtggtcaaaggtgattattttatcgtgatggcgctttcgaaacagctgttgacggtgttgaacttgacgttgtcgggcgatcttgatgcaagatgactatgttgtgtctcaaattaccgctcggattcactgcgagctttttgaatcgcctgatgatcgaggtcggcaggtcggtcgtgcagccgagaagctgtgtagcatgtgtgtttcaaggtagacagttgtccttttagcttctcacttcctgatgagtcgcatttgatgatgatatctgatgatgatgatcagatgtagcgaggcccgaattgtcaacaaatcacaatggcagagggcgacgtcgatattgttgctgattacgtaatcgaattcaaatcgtaaacaacccgctcctccccctcgtcgaagtagcttgagcgacttggttaccagttcttgaggccatcgactgttgaaacacatgattctcggatgaaccagtctacaatcgccaaatgtacgcttcaagacacacgaaaccatgcatccgtctcgtccgaatagcctccattccagacatatcacggtcacaagcatgcaaacagttacaatcaaggcggcttagcagcgatgcgatcctgatagacaagacaaaacttgacagtgtgagtctactctacgacttcgagactcctgctactatctacggagagctcagtgtctgtttggacgaatctttctcagccgataatctatcgttcaaattcgctggacccatacttcaacctgtctttcgaggattggttagtaatggcccatcttgacaaggaaattggacatctaggtcggagctgatccgccttcgatatgaaaaataggcttttccgaaagactccaagctcgactccgaccctgctgttttactgcaaccgtccgagcgttgtgatcgggaagaaccaagtgcgtcgggacgcgcttactgttccggaccgcctttctgatatctctctcggtatgtccatccagaatccatggaaagagacggacccagatcttttatcacaggatgccattcctctgatccgacggcgttcaggaggagggacggtctaccacgtacgcattcgaccagctgttcctagcgccaaattccccagctaaacttctcggctgatgcaggacgagggtaatatcaatttctcgatcctcgtccctcggcacctattcagccggtctctaggggccgggatcatcgagaacgccctcaagaacaggttgaatatcgaccaagccggggtcaacgagcgtggggatctcatcttgttcgacgatgccaaccagcacgggtggaaaaaaataagtcgaccttgggtaaacctgcgtgtgctgcacgtagacttaccgtagaaaacgctttcttcttgcgtttcgccgatacacatatcgggttccgcgtacaagatagtcgcgcagagggcatatcatcatggcacaatgctgatctcgtccgacctgacctcattgggcgtttacctaagatctaaaaccgtgagccgcattccagcgtgattgctcgattggggaggggggcatatgtctgaatttcaataaccctacagcccgacttgatcaccaaatccgtcgattcggttcgatcgcctgtcacgaccctccgctcggtgtgcagcgatctgaagcaggaagatttcgttcgagcggtcgccgaagagtttcacgctgtcttctcaaaagatggtgtgcccgctttgcaagcgtccgatatcgagtctgtggaggagggcatctcgatgggagacaacgatcgggccgcatatattcggcaggaaattgctgaactcaaagtgggtgctcaaacgctacaacagcgacgacccagcttatattctcaccatcctgcagagctgggaatggttgtacgggtctacaccagagttccaccgggacttgtatgtagaactaccctccggcccgatcgtaagccaagtcccgtcctcgcaagtcccgtaaacgatctcacaggctgatgaaatgcctgcgtttccgctagcatttacgcattacggcgaagaacgccatcgtgacctctgtaggcgccaccggaagctccgacgcaatgaagcaccggaaggctattgagttcttacaatcgcgactacaaggccacatatatggtcgatcatcagatggagatttcgaccagcttgtatcccagacgatctcgcttatcgatggaactcccttgaaagggatctgaatctcacgacaccgccagtgtcttgtggtgtcttatctgccagtccttgagcgagcgaaaatcagtggtgatcgtgcttgagaacttcgtccagtcgctaccttcctttcatcaagcttgaacccctgattctcgccaaccaagatcctttcacgaactggctgatgaaccagctcgggacagtatatagacaggggtctagacagcactgtcgctggtgagcctgggttgcttcttaggtctgccacgaatcgggtggcaaagatgggcgccggtatgtcggaaaaggctgcaaactcacagaccgtcacggctgacatccaggtcccgctgacaggtagcgactgttggaagtgccgactgacaccgggaaaccgttgcaagaagcaccgctcggcgccatcccctttatggttaccacccccatcgcctacaccttactacacgaccgctccaccttactcggctcctccaacagtaggaaagtttgaaatcaagtcgacgactcagcccgcgccaccttacgtgacgttgcatgccgccggaggatcgtcccgccccacgacgatgccatcgtttagctcccccgaaagcgggaccagctttcattaccggcaatccaactccgcagcgtccccgcataagcaggtgtcttttgcgccgaacaagaagtgactgaaggataggagctatatggaatcatgcggacttttcaagctattgtgtcttgttcttgtatcctaggataccccgttcacttcgcgtcactgagggcaattcatcatcgccttgctcggaacgctacattgactcagagctcctgcttttcagccttgcggttcttgatatcaagcaactctacatcaaagatcagggtagcctttcctggaatcacaccaccggcacctcggtcacctggaagaaaggcagtaacgcacagggatgtcagcttcaagcttggccagagggatatgcgtgatcccattgagattacttaccgtaagccatgtcggaggggatcgtcaagatacgtttctctccgatgcacatgtccaaaagacctggtcattcggccattcgaaaaggtgaaaagggactgtcaatgatcgtgtatgcgttcgaatgagaactagacgtaccctcttcccatcctttgatcacttggcctttaccgactggcaatacaaagagatagatcgctcggaattataagcccgggatttatttctatagctgggacgatgccttactggtaaagtcgaacggtcggttgcggcctctggagctatcgaattccttcccgtcggttaaggtaccggtgtagctagaacatcaccgataagcgacggagatcagacttccgacatgtttctaggtagcgacacactgactcactgcatgctcaattgatcacccttcctactcttcaaaggacaatcctcgggcttgtgaaccgtatcgatctgcaagccggcagcgtgtacagcgctgacagccgcgagtagggtagtgacaatggcagtgagcttcatgatggcctaagaacggtgatatgtgggacgaatggtcaatcgggcgtcgtataaggaaacgaattcaattcgaagtagtgggccaatgtaccaatgtgcaaggagcaacgtgaatacgtggaatcacgatcttgtctcctgcatctcatcaccccccgaggcgaggtgctggctggagcagatctagttgcatgccgagtgctggcgtcggatgcttttatacctttcggtggagaccccgcgattctcgagtaccagtaatatacttccgtcaatcttgcgtctaggtgctaggccggtgctaactaggtgcaaggttgttacgactaactccttcgtacgttctcatcatttcatcaatcgatatcaacccaaaacgatctggatcagctggaactttattgacacggcccatttacgaaggattgcctcatcaacaacgcttgggagtgagggacgaaagagagcattacgtcacgatgcaagtaggagaagaaccagctccgttctatccgattggcagccaagttttccaaagcgtcgaatatccaggaaggattggtccatctccagcttccctcgataccgcgctgcgaggtctcggaagacctgaagattggaaccatgtcttcaacaagactaggagcaacctggaattatccctaagacctggtaatcactgggctcatcccatcccgggcgaccggacgaacacacaccgagtgttactcaaagtcatccgaagaagacgcaaacaaacgggtggaaccgagagtcaggacttggcggacgagggagctacccggagagatgaaggcgtttacaagatcgaagtccacggtaccgtcaagcaaacggttcgatatcgaggtgcgcccgtagacttccgtctggcacagtgctttgttctcacataaacacgcccgaacagccatggcagactaccagtacaagccgtcatcggactcacacatagtcaaattgatcgatggccttctcaaggctgactgtgagcgtatcttgctatcagtgattactcccccctgtgctaaaccactccccttggtagacaacaccctttccaccttcgagttcttgccactcgatgaggaataccacgagcctctccctacaggacacccaatcgggctggatgaacaacgtagcgttaaggatattcaacagcagaagacgtcggattgggacgacgccatcactcggcgcagtcgacttgatgtgcttccgcctcctcaattcagcacccaatcgattcccgccagattcacgtaagtcggcgtgagattccggtacacagacgaggccgctaattgacgcaaattaagatttgaacatggtgctaattccaagctggagccatatactaatccgatcaagggagacgagggttatcgatatgtcaaccgtcacaagaacatcattcataatttccggcagattcgacatgcagatttagatgagtcgtaatgtgacacggagatgccaagtatcgaccgaacttacctttgatctgcttatccccctagcacatactcctctggaacctccgatggaggtcaagtccgcactgaaacacgtcaacaaggaagtgctcgaagcggttaagcaggtaagtctaccctcttgaaacccgcaagggccgctccgcttatgtgtgacaatgggatcaaagaaattcgaagagcggcccatgtggtcaagattggccatccacaaccagtttgatgccgagactcggcggctcttcatgtcgtgagcactgtctcgccccgacgctcgtaatgaatcagccagtaagaattggtcgacgatttgacagtaaacacgcgtatctgccgggggtcgcatatattatcgtcgacggtccgttcagagacaatctcattcgcttaggatacgatcctcgcaaaaaccctagcatgtacaagtaagtcgcaaagcgcatcggctccatgtgatatgtgctcactaccacaattctacctagataccagcgtctatactttcgtaacgtacgagaggatggaggtatgaggatgtccatgaacaaaattcaggagaaggatctggatcatgcagctcctcggaatgctgcttggcaactcgagcgcatgaagcagttacatggcgatgacttcgaccctgacgtcacgtaggtagctcggtggtgccaagtttgctagtgctgataggaacggctcgttttcagcaaatcgcaccttttcgacggcaagtcgctacaccgggacgttggaaactttcagctttgcgatatcagcgatcctcaattggagaggatgatacacgacccaagagctttgtcggcggtactgcatgcgagtccgctctgccgtctctcgtcgtttagcactcctattgacgaccatttgaatcgacaggatgtcgccggatggtataaacctcgacagtactatgcgatcaaaggcttgctccggctaaaatggcaggctctggtcgaaggcaaggagtgctcggctgagaaggttgaagagataatggcccaattcaacgactttgaaagtgcgggcccagtatacgacgacgacgtggacaacagccggctctcaggtgcgcagccggcaatgcgggccaagaggaagcctcgaaagactcgggcgaagcaatcggcgttggatgagcaggctttagctgtgggatctcgcacttaccgcggaccactctcggatgcagcgcaacaggtttgtcccggtacaatgctaaacgtaggtcgttcagcgctgatggcaagtccgcttaccataggaacaacgattgcgaggcgtccaccctagagcatctcggatgatgagcgtgacgacaacaggccgggaatccgaggtcgagccttgggaagcgtcctctaatgttggagacgagtgaccgggaaataatcaaaacgcgctgcagagcgaaatagtttctatgacaagggcccatatgagaggggcgcgactatgatacagcttttcacactgattccgctaatccagctattcggtcttgcgttggtctacgtcgtaactctttcctcgcatggcccataccccccagttcacgcggaccatgaccctggggtcgaaatcgcccgcctcccatttgaggcttccgaacggattttcgcccggcctcagcaggatgtcgtattcgcccttgattccgtcgacggaatcgagactgttgacgtctcgctcgacatccctgggagaaaacccggtgacgaacaggggacacttggtcgtcaagacttgctgcagagtctctttccactcgacctgggcctgtacgacctggctgccatcctcgttgacggcgccacgtccagctgagggcgaggggaatccgaaaccgggacagaatgcgaaaaagacgtcggtatacggatcaaagggaccgaactggtcatggatagattcgtaaggcgattgcagagttgtcaaagtcaaggtagacgagaccgggacggtgtatgctgggactccgtatccgtccgactctgatcgacctcgactttccgtgcccgagttctggctgggagtcttctcgtcgtatagcgtcttgtctcccccctcggccgcgacggtgtccggcgtctgctgaccgtctcttggcgggagaggtctcgtgggcagggcagcttgaggtccgacaaagtaaaagtgaaattgggtgtaggggaataagtggcagacctgctcgtagacgtggggtggcagagccgattcggcccgagcgccgaggacaaagatcctgatcggagtctgggtgtttcggccgctggctgtagggttggctcccataggtgggtgcaacgaagtgtgcagagctgagatcagaccgtgggtcagtaaggtggcgcacatatacctaaaagcatcgaaccgccacgacccacctgccatgcttcggctaccctcggcagtcaatctaccgtcgagaccgcctcttgatcccgcatatggtcccaatcgatgcatcacgctcgccatggtcatggggtaggtcaagagcttactgacgtgcctcttggctcgctccgagttggttgaagggaagtttcgcgtgtagaggagcgtgtcccaattggacagggcgggcgaggtctcgtagtcctgttcacctgggtggagcaacgttgggcgaaccggttgtcagtcgtggctgcaccgatcgtgcgattggtcatagcgtcaggacagcccactcacctggcatctcaaactcgctgattaacctgccgctccgcaagtcgtgctcgtcttcattgatctccctcaatctcgaacagtattcgttgtgcgcctctttaccctcgaggtaatgcccctcggagcaatgagtcggaaacccgcactcggtgcatgaaaagtcgaccttgttgacggtcttagggggtgaatttgtcgttgtggctgtcgtttcggcgctgtcggcggcaggttgagcctgttcgagacaggtagggcaaggtgcgagcgacttgatcgtcttggctcgtcgttgaagctgaatcacgggactctgatcgaggatgtgaaagaggtcgtcctgcgaaaatagaggctgaggagggggcggtgggggaggcggtcgatctgacgatcggaagatgttcaaaaacgacctctgctgctggcccgatgcgttgggatgaatgggtcggttccggcgccgggatgcagcgggaccgaggagacacgaggaggaagatacctcgttgcgtaaagtcgactgtgctcgagagatggctgaacgccgcacgatcgatcgactgaccgcctgtgatacggtgcgggccaggttgttggattgcatcgtgatgaattgaagaatgcaggtggtccgggggagggaaaagacgaggctgtcgtgtttcgatacgatatctgacggcagtactattgaagtggtctctttgtttttggagaatctagctcttctgcaagtcttgacctgaagactctcaaagcgagttgtgaattggtttgatggtacgtttgttgcgatgagacttgtgagtgtgacgatgaaatagagttgcgagttgcaagttgagatcgagggagatcgagtgggaagaaatcggaaaacgggtcaaacggcgaagcgacaagggctactagtaattctacaaatgacagactagtcgatttcaagcgcctcaggtcaaaagtcaagtaatttcaacctggacccattagtattttgtcaacacgaacccagctcaagctcaagctcaagctgcgcgcacgcgcggggtaaggcgacgtcgatttaatcggacacatctcggctcatcaggtcgcatgtcccccccgcccgcccggctctgccttgtcacgccctgccctgccacgcttctttaccccacactacacctactccgggatcgacctcgtctgcgtcatctcacgatcaggtccttctcggaccgacatcaaatggtcatactcgacatcgaatcacacgctacaaggcctgacacactggagaggggaaacctgctaatcaaccggtcgaaacggtagacagttctattcagctgctccgacttcgatctcaggatcgtttagtgatcggcaaccatgtccagacgcgtctcttacgtcctacctgcctcggacgctccggtacccttgctctcgctaccttccctcaccgaaccacgactgggaaggacgagcccgttgttgctacctcatcaagatggcctgaacggggctacagcgagaagagaagcgcctcagcgcaagaataccacgctcgtacgggattcggctctggattcggatggtacccatcatcccaggcattgcttgggtgtggcagcgattgcactcgatacgtcgactctgctcgccggtcggtccaccccggaaggtatcctctatacgggtggacgggatggactcgtcgccgggtgggagctcgggatgcccatgaccaaacgtcgaagggggaggtggcacgagacattgaaacccggcgaacgggtcaggtgggaacgactcgagctcggcggggccgggggtgtttccgcgggtgattgggagggggacaacgactatggtgatgcggacgaagtcgactccgagttggagtatcaggaggacgagagttacgacggcacgtccagcgatggcggcacggagggggaccactcgttgctctttgaagacggtgagaccgctcaaccctcgggtcacaagtttccaggcggacgagggggcatatcacatcgtcggagagaattggaatacactgaaaggtggcagatcgacaaggacgtgctagatcgccgacaggtaagttatcggtttccgtaggggaaccctttcactcggtcgcagctgaagtccccgatcgccacgatcgccatcctcatctagccggcacctaccaccttcagacagtcggtccagacgcatacggactgggtcaacgacatcctgctgtgcaatcagaatcagaccgtcatctcgtgctcgtccgatcgtaccatccgggcgtgggcccctcacgacatggaaaagagcgcttccccggaactcgtcgggcagcatcgtgattacgccaaggtgatctcctattcgtgagtctcggtacaagatccacttggcccggagcacgattattattgatccacacactaacatggtaacgtcgcttgacgcgcttcgcagcaagtacaccaacagcctcttttcgggaggactcgataggcaggtctatctgtgggacgtatctcagccccggcccgaagaccccgtggccacgctcaagtttcctgatctcatcggcggggaggggggcaagggtagtatctatgctttgacggctagtaagtctttcaaatacatcccctttttcgggcgggaaataaattacctgaccgcggacgactcccgtccaaatagatgatgcgggaacgttggtcgccgccggatcacccgagcgggtcgtgcgcctgtgggacccccgagctgctggttctcaagacggacagagtatcgcaggcctcatcggccatactgacaacatcagagcgatcttgctgagtcaagatggtcgacacgtcagtctttcgttcgcctctacacctcgatgtgcgaaggaggtgttactgatcgcggtgcctgtacctcctggtaacagcttttatcggcgagttccgattgtactgtcaagtgcgttgcgagtattgtcgaaaagacggtcaatggtgaaaaagctgatgacgtttcatcgctgataggctatggtcgctcgccgcgcagcgatgtttgcacactttcacccatcacaccgactcggtgtggtcgctcttctctgaccacccaaatctcgagcgatttttgtcgggagatcgagcaggacacttggctgctgtcgatgttaccggctgcaagaccgactattctgacggagagtgtgtcctcttggcaaaggtcgacaaggaagaaggccggaggggtaccgaaggaatttctcagatcatcggcatggacgatgagttcgtctggaccgctaccgggagcgccagcgtcaagcggtggagagatgtcggcaggaaacgcgatcgtctggaagcacctgttcactctggcgatcgacgcggcagtcccttggccggagctgcccctatcatggcagcacagcccgctcctcccagttctgcaccgatgatcctggtcgatggcttcataccgccaagaagcaaaaagacttcggcggagggaaccagcccttccgaagccgtcaaggggttcgcaacgcctgatcagcgggacggtcgaacagtagcctttgcagagatgtccaagccgacaaatccgttcgatgatgctcatgacatcgctcgcacttcggcgcctactcttgctgttcggaggacgactggatctggggctcctatcgctgggtccatcttgtcggtggcctcgtcgcgcactggaggtgccgagtatgcgcttggtcgcaacggcattgcatacgcgcatcaagtttgtctcggcctaaagaccggcccacacggcttcggcggcagtaccgtggacatgaccgaggcggacgaggcaaagacaagagaatcattcatgggctcagcattgtccttccgtcggagcagcttggccagaaccgcccaagcttcatccatcaatgggacgcaggctcacggccgagcgacccctgatccaggcgatgttgctaggcgcgatttcgaagagcgagagatccttgtcgaggcggatccgatacgcgaacaaccagcagagatcatcagaggtcgtcatggtcttattcgagctttgatgctcaacgatcgtcaacatgctctcactgtcgacacaggcggccaagtggctgtttggaacgtgattcagggtaaatgcgtgggacgttatgacgagaatgagatctcgggcgtctaccaagagagcggttatgacatccaggacgtagccggaagggattccaaggaagcgcttgacattgtccgcgagcggattgaaggagaatcctctaccatcacctggtgcacagtcgacacgagaatcgggagtttgactgtgcatgtcgaggagaatcgatgctttgacgcagaggtctacgcggacgaggtgggctatcggggagacccaagcttcaaggaagatcaaaggagtgagtcaaatgaaccacaactttactctgtttatatttatgctaatctgggcatcgctgtgatcgcagtcaaccttggcaaatgggcgctcgccaatctgtttgccggcctgatcaaggctgaagcggccgaagtcgctcagacaggcggggcagacggttcgactgacagcgctggaccaacatccactacagcgccttctttggcccgcagtcccgcaccgactttcattccactggatcgagcgtccagccgacgagcgcgctctcagtctatggttactggaggagctaccacacctggagcgttgatgtttggtctggctacgcccgctattacgcctgcgattttgccgccggtaggtgctcagactccgcaccagaaccccagcgggttgcgcggattacgcgaaacccctggcggtttgccgttcatcccccaatctcccgccaccctagcttcgaatgctgcgaccccgatgagcccgacatcttccaacatccctatgcgatcgccaaaggtatccgagtcgagtgcccccaaagactacttcagtatcaagaccggacggccttcaacgacagaacgcacgaatcccccaacgacaccgggcagtattctgtcctcgagtgcacctgctcaaacaccaggaggatcattcatgggcaagttcaagggattcggcagcaagggcaaaaagggtacaggcgtcgaagcagtctcgactgtgccaatcgctccaatgccagaagagaccgaggaagacgtggcaaaggtgaggaccaaatgaaccctatacatgtgctacaatagtatgttgacatctgaatctatatagtcacctgctgcaccagaaagagaggctgctcagatccgtctactcgcacagatccgctcacacaccttccagccacctccacccactgaagctccccccatagatctccctgccgacgtctcgttgctcatctcggaagagagcaaggaagccggcgcctgggccgtcatatatcgaagcatggtcgcgcgtacggagcaagatatggagcctctcgaaatggcggctccaggctggatgctagagtatctgttcgcgggtcgaaacagagtcaaggaaccagtgaagttgtgcttcatcctagaaccttggcaaggaggcgactcagctgagcggctgcaacctatgcctgcgaagtaagacaatatctgagagagcaggacataggccctagactgattgaatgctctgcgtcctttcatagtaacgctcgtcttaccgcgaatcgggtgctaagaattcgcaaggttctgcaatacgtaagcagtggcgaagctccgactgaggaaaactgtctcatacactctacgcttgcttcgcgttcagatttacgacaaactggagctgggacaccacgatcgaagagcttccgtcgcatcaatgtcttcagaggggcgacgagccagtcacgatagtggcatgataaccgctcaatcgacggaagtgtcaggaaagagtccggccaggttcggcgccgtagaacaggctcgcgctgctgccgttgcgaaaaacccagacgcggttcaaggtagtagagcgaacggagaagcacaagccgccgatgatatcctggaggtattgtgtcacggtgtcgtcgttccgttgaccatgactctggcggcgacaaagcagtacatctggcaggcacccggtctcgcgggagcgggttcctcgggtatggatgtcgtgcttcagtacaggtggcggactccaagcaaccccgcctgaagggttcattttaaacccgatgcctttgaacaacggtctgtgcatgagaggaggtggatacaattttgtacgtctcaaatgagacgattggcttcgataaaatctggcatgaaacgtttcagtcagcgtcactggtcttgcagtgagcgggaacatttcgccttaccttttgtcaattcgaacgctccaaatgtaactgcagcagccggcaccgcccggatcagggtcggtgcgagacctttgaaaaggcccggtctgttccatctttcagtacttgaccatacgaggcggcagttcaggatacactcacatgccgccctgttgagcgatagccgaaagctccgtcgcaatataacccaggcccggacgaggtggttcggctcgcagctgaactcggcttttgaccatgtcaagggggtatgacgcaagccagtaacacgtcccgccgaccgcacctgtagaggacgggtgtttcgtcggcttcgagcggtccgaaaagctcgcccgagtggttacactcacctgatgcgagatagacgcctgtgctaggattctgtgctcccgactgggtgagagcgcgtttcgtcatctcgtaacctggaagggccaaagtaagcgatcagtcgatggatatagagaagatcacgccgaacagcacacttgccggtatagaaaccaccgtatgcgggtatttcacgagctaccgttgcctgtcgaagttgttcgtctcagccggaaggtagatcattagcgacggggaacgacttgcccagtaccctcgcataatgccatggcgaaagccgtatcggctgtacaattcggcgatgactgcggcgagtcgcatgtctcctttgccaccatactataaggggcaagtataatcgtaagtcaaggcgactttggcaagatatttaggctccctgacctggccctgttcaaggcaatgagacagctcgtcagcaagtggattgaatagcgcctcacgggttgggtatgatgtcgttgaactcgcctgcatacgaatcttgcctagctcaacctgcgagatgggagcgaccagaatcaatgggtgaccttacatggacaaggctattggaatcggtctaccggactagcaagaaccgcctgaatcgcgcctgcagcgcctccagccagtgccgtttgcggtattgagagttctccaaagggagagattgcccgcttacaagttccgtacgcggcaaatagtagtgagttgacggcagcaataccgatcaatgggctggccatccctacaaggcgggataggaggagattgtcagcgaatatcggatgacatggcgcttgaatggcgcttacccttgtagaaagccaatacgccttcttttgcagcagtctgccgggcaatatcccatgtgtttttgaaggtacctgcaggagccgtttgagctctctgtagggcttggagcgatagcagttaggaaacctgtccgtatggacaagggggtacgtcatcgagacttgcgactttgatcgtgtcgagcggctacgctagccataaacagagtcagcatcaggtgttctatacgtgggacgttttcaattggactgacctgcccgacaatgacctggcaggctcccccgacgctatgagatgatttggagccttagaatccatattgtgtaccgagccattgatcgctttacttgcctgccggcgactaattcggtaatgagattcgctccatccgtcctagcggtgatgggctgatcttctgtatccatattgggtttccaagaagggcaataggtgtgccgcaatcacagtctcttggtgagaggtgggtgtatgcctgaccaatgtcagtgttgtggacaatcatgaaaccccgtctagctagttgtctatctgactctgacgaatcacggaaatcgccgtgacaatctccgcgccgatcacgccatgagaggaacttcggaccagggctaggtctgaacatggaccatgttatccatacattcaattgcgtacatgaccacatttagcttggagcacaacaattctttgcacctcattcaagagcctgatagactgctcgcaagtgccctactgctatccacactctgagcggaggaacctgtcgaatcgttcacacatatccttaacaagaatcaggtttacaaggcgattggcaccaccattgaaccgatctaaagcaagggttgtaggatcaagcagacttcagccatgtcgtactttatgacccagtcagtgtctgaagacgtcttcggcatcgcaatatggacactgacaccaccggtcactttgctgaaccgctgccctatcttttttttttgccccttgatgcacctgacgttgggcttgcagtctgccttcagggtggcacgtagaccaggccatcgaagtcgaagaagatcgagtggtctgcattcgattcggacacgattgggaccctcagtgtatggtcatggacgagacgttatacggcgtgcagggcaagctacaaaatttcgcggtcatctacctaggtgagctgcgaggcgatggcaggactgtccagagtggtatcctgacgcgtgtccggatcattcgtagtcgatatcaccaaggtaccagactttaacaaggtcaattcgcacgctatgtcaagggagatttgggaaggggctgacgaagaggctgttttttgcgccacagatgtacgaattgtacgacccgtgtactttgatgttcttttaccggtgagtcggggaaggcacgaggggagccacactattgatctggttctttgtgcattgccaaaaacgactcagaaacaagcacatcatgatcgacttgggaaccggtaacaataacaagatgcaagtcgagatcgtgaacggtccgagccgctttcttgactgaccacagatacaatgtacccgcagcaactgggcgataagcgacaagcaagaggtgagcggtgatctgtggcttgacccttggcgataacgtcgcgcatccagcattgatccacctacactcccgcagatgatcgacattgtcgaaacggtgtaccggggagcatccaagggacgtggtcttgtcgtggcaccaaagggcaagtcagatcgagttggaccgactacagtcgagacttattgtcatgactttgctgctctgcttggtgaacagactactcgacacgacacaagtattagggcagcgttgtggatggtcagcgtcgtggtcgatcagcaccgtttagagctttgcatttgtataagaagagcatgcaccgttatgtctaagaaattcaggtattttcgtggctcaacccgtcgtgtgtgtgacctgcagatagacgttgccaggattgcatcgcggcgcatatgacgtcctggtttggcagtctcgatgtgatcgagagacggaggtcacttgcgctggagtggtatagcatgacactttttatcgccacttgcagactatgcgtgaccggaggatcaatatgttaggaaacgaggccaaacttcaagatagagtgtttgggagcggattcgagaatgcggaagcagtgaattttgaaataacttacatggtcctaccagtatagaagataaaacacagaaaaagaaagtgaataggccgtcagtggcttgaagaccgcactgttgaaagggaaaaaaagggagaaaaacgcgcaaaaagggcaaaaagaaaggtcccaccagtgactcgaacactgcacccctcccacttgagttgcaataaccctaagggaggatcataacccctagaccagcgggaccgggatggcaacgatattgatttaatatgattcatttctttgttctgtatcccatatgtctatagcaatcacgccaatctcatcgacaagccccattatggggatctaattgcgttataggtagcagggatttgtctgtgttttggctgatggagctggtttcagtctaagtgatccaaattctattgtgcaggactgttacagctcgggccatactatctagccatagactggaattgcagctggctctcacggtctgacaggatgaaccactagggaggaatgtcatgtggcagtgtccaatgtgtcatctgaggttgctgatatgaactgaagaggaacagtaccattaagtgctactctatatatatccttcagtatcctaagcacaaaacctcccctgacaagtccatatgttcttaagtactctctaatatctaaaacgcatgcttacccctgaacaaatcctggctggaccagagccatattgtgactggacaagctgcacacactgccaatctccctgggacacatcaaatctcaaacacgctggaactagtcatgtgctgtgcccaacaattctcatagatatactacatcagctgattagtttgatcatatagaccaatctctataatgatgccagttcgtttctgaggatttgctagtaacaacaggtaggcctatgattgtacctctatgactgaagatcaccccagtgatttgctagtaacaacagaggccacatgaggaaagcttgtagcttgcgtaaaaatttgtttgttgacctttgattatgcacagtgtacagaaaattcaagacgtctcttgttgcttatgtatgacaatccccactgtgcttctctcctgcttgctttctctagagaagtcttccaatgggatcttccgctccacacatgtcacatcacatgtagacacattttggaaatacatcaatgtggaatattgcccagagcacaacagcaataggacgactttgacattgtccctctccctcttttggggggctggcttcattcagcttatctatctcatctctatatgaactagcggtcaagtccttctaatttgaaggttttgactcttgtcgtttgtctctttgtattcacttgtagtctggtcttatagataaaaacctcagcctagtatcaaggttagggctagatggtatcagttggtgttagatccaagggccagtgattcaagcatagacaatggatataggttgatgtttactaccagtggtggtgttgaagattgatcaaggttggtaacatatgtagacatccaggaggtgtttgatgtgaatattttattagtcaatatctgtcagtatatacgatgtatcaatggtgtcgcaggtaaaagcagtgcttgcagctgcggctgtgtcttgagccaggtaattgtagtcgccatccctacatgtagttgtttgacccttctcactactgatttcaagcgactattgctagcaaggaacgtgttttcgatgcttgactctatactatacaagacatatctaaatcgtttcattgcttgattttcaggaccaaattcatctgaagtttgtccccattcttcatattcagagagtctctctattcgttccaatcccactcctaatggacctgtgatggtacctgagcggcattggtgcttgagtttgtcttctgcaactcactcagtacgttgtttcaatctgaccaagtcagtagcgtgcatcaaacaagtagagtgaccaagcagtaatgtatccgtggaaatccctccatgaacttcctgtccaaaagtattgtacagtcaaggcgttgcgcttgctacgtgatgccctgcccatgcacaccaatcccttcctgaaaattccggggcaacacgttgctagtaccagtgatgcaatgatgttgagccctaatggatcactgtcactgtttagcacgatgtgtcttgtgcacagatggcaaaaagaggagaagtctgtaagactccgatgtgtaatctatgcaaatgggaaagtcgcgtggcagttctatcaattggttgtgcaataccatggggcacacgtcattttctgtgcccaacatcgtaaagtagcactgcatcaatctattgtcaggagacccgatatatgttgcaatgaatccgaacagctggccttgcagcttcacaatatgggttctctcctgcaggccaagacccgagtgaagataccaagtagctaataacaggaggatgcaggggatgaaacatatcttacgggctggctcaggggtggctatgttggccagcttccataatcagggcacagggattatacagattgagcacagaactaggtgtgcaataaatttgcatgcctgagaaaggaatgccgcggaggcaaatgggtgcttagaatgctacttccgacaattttgccagtcatgatattgcgttgaagccgtctttgacaggggatatgcaagctggccccagtcctgtgcgtaatagatgaatatagcacacatttcctgcacaatgtcacgctcaggccaaaggaggggactgagtggatgataggagaggcaaaaggggacaagtcaacttggcaagcagattggttcatgcaatctgccctgcaggctggtcagacaacactgttggtgtagagtgacaaggtgttaaggaaggaactaaatatgcgataccagggaatccccagaaattgctgactttgttgtgggttggcaagtttgttgagatattggctgctgccaatggtgtgtagccactcctttgcaatggttatagtcactatgtctattgtctcttgcagatgatagatgttgcttgcgtaaaagtaaagtagtacatggttgttacgggaagcaacgcgcatccggctcctatgttgccggcttcggctcgcgcgctctcgtcaccgtctctcgtcaccctctctgctatcgtcattactactatcggcacaacaacgcatattcgatatcaccaccagcggagaacaatagcgacatcgacggatattcaacaaagaccttagagctcgacaaccaactacatcaaacaaagacatctgactcagcaaacgataattcctctttgattaggtgtcagactctcgactttcacttcggctgtttgtcccggattcgtcttatccgctcttgggtcgcctatggttctcaactcgcgataccactctcgtttttgtatatatacttagtagaacttgaccaaatccggcagacaacgttcttgtattatgaaggtcaagttccaatattgcattctttttacgcctactgattgcaacaacactgcacctcaagacgtattgtgcagaggttacaattcaggaaagtcgctaaatagtagacgtctcaacgtttgtactgcactacgcgctcgatcctagttacctatagcgacagcacttccttatccgaacatcaacccagatacgtactccccaaccgaatttgttccacctgaccgaattcggcttcgctcctgttgaagactacctacgatctgtaccaataccgcttagatattcaaagacgcgacttagcaaagccccgccgtaacaatggtagagggaaaggaaatgagtgttacagcggagctttgctaagtcgcatcaggtgcatatctgagcggtagtatcggtacagatcgcaggtagtcacaacaaggagcaaagccgagttcagttactggaagcgaattcggtcgagatgatacgaatccgggttgatgtatggataaggaagtaatgttgctataggtagctaggaccgaaagcttgttcagtacgaacggtgagacgtctactacttagcgagtgtcctgggttgtaacctcttcacaatacgtcttgaagatgcggtgctgtcgcaaatcagtaggcgtaaatagaatgcgatattggaacttgaccttcctagtacaagaacgtcgtctgccggatttggtcaagttctactaagtatatatacgaaaccgagagtagtcgtagcgggtcgagaacaataggcggtccaagaacggtgaagcgaattcggaacaaagagaaccgaatcgagggtcgagagtcggtcatctaacaaagatgaatcgttgttgctgagtcgagatgtctttgttcgatgtagtcggttgtcgaactatgaggtctttgttcgatatccgtcgatgccgctattgttctccgctggtggtgatatcgaatatgcgttgtgtcgatcgtagagagggtgacgagaccgcgtgagccgaagtcggccgcgtaggaaccggatccgcgtcgcttcccgtaacaatgaggtccagatggtctcctatatatactattctgatgagcatgtcctcctagtgttctcgcagtgtacttgcaactaggctgttgcggatttgcaactcagacacataggtgcaactccaggtgcaaatgagtcactgatgtgcgactccagtcgcataagcgtgacttcagtcagatcctagtcacatgttgaccctttgtgattgagattgcaccctgagcatcacctatgatgtcatagcatgccaatcttcaacagagcttgcttcctgcattcatgagccaatcatggtatgcctatttgcaacaaaggtgtaggtccgaccgtgagaagtgtaaggtaattccgtgtcagaaggtgtgacgactcaatcggtttctgaattggaagccgccaagcggaggagtcgaagccgataggtctctggattggagatgacggtattggagttggggggttcaggcgtttcactcggactgaggtgacgttctgaggtttgacaaataggacaaagttgaggtgaagtcggaatcaaggtgatgcgaagactaggtagaggttggtaacatatgatattagactcttgactatttaccagaggcaagagtcaaaacagtcgaaatagaggagtcaagttctagtgtatatatacatgtcagaatgagacgagtctgtttgagcaagtttgagaagagaaagagacagagcacaagaggccccaatgtctgcacatcgagtccgtattgttccgatgtcggacaatataggatggtaatgtgttctgatatgtgatatgatgacaagttgtatatatccaaggtggatcagaggtttggatgttggagagtattggaagatatatcggaaggtggatatgtcgaggaagtctccgaggtggatccacgcttgggatatcggaggatatacggaatggtgttggacttgtgtcaggagtcgatatgatgttgtaatatggtagtcggaaagtgccgggtcctgacgacatcccacaagccactcgctcagctcttctcagcttcctgaggtggtcagcgaaattcacaggtctttgcagcgaacacagcgattgcccgcggctggcaaagtagtgtgccaaggtacaggcgtcacggtcaacgggtgacgtgataggagcccttgcattcgtcgtaccacggtcagaatcgagattagcagcagcatcgcccatcgtgcctccccgaaggcgtccgccggcaaatgtcaaggtcagattcgcatctcgaccggccgagactgcgcaacgtgctgcggaccgtctcgcaggtgtgtccaccgcggtgaagactgcactcacgatatagattcggcctaaagtcttgcgcaccgcaaccgcagagcaagctaaagaacaagaatttaaagacgcttttgcctatgttaccagcgagatcggttggcaccctctgatgtggccggtagcgtcctcccgactctctcgcttgaaggctacgttgaagcactccgtcgaatacatcaactacgtcgtcaaggaaggtgtcgaggaaggttgcgcttttgacacgacggatttcgacaagttcaagaaaatcactctagggtacctcgagtatcggcttgcgcgcacgccggtagacggccgaattattgccgcgccgacgtcgcagcatgaaaagtgggatttaatcgcattggtcaggtacaaatagcgacttacccaagccttgtgactgacgtagttgctgaaactatctcttgataggtttttcgcgaaacccgctctcaaccctactcagtactctgccttcgtcgccgatcaatcccgggtgtcaaccaactcgatgttaagggtagggtctgacggccgagatcggtattgggtccaaagtccgattacgtaatcgtagacaaggtaacgtaggttgccgtctactaccgatgtatcgtctaatattgagtactatcggtcgacatatctagacatctaaggtgatgtagatatcgacaactatcggtagatatctgtcgatatggtgtaaggtggctgggtagaagcaataccagcggtgctagtggtgttggtggtgttgagttggtgattgtagtcgttagtccctacctctcaatgtttgacctctcccttaatactcgtgtctgttgttgtaactatcggtactaaggaatgcaatattgacgctggatctctctactatacaagacaaatcgactaagttctgccgatttgtgtcgactcttatatagacgtttgatcaagtggtaaggttctagcagtaactgtaaacgtgcatacgacaccacttccttatccgtacatcaacccgattcgtatcatcttgtaaagatgcgactgtgatcactcatttgcgaccacaatcacatcttgcgactcctctcacactactgcaactcagccacagaactgcgactgtggacacacatttgcaactcagtcacatatttgcgactactctagtcacaactcttgtacacacaccactagcccttcggtgtatatataggagtccccaccaggaggaaaggcatcccttttctcttctcttatgggaactcagacccattgacaccagattcaatactcttaccttcattaccttcttcacctttcaccttcaaccttcctcaacaaggcttagctacccttgttgcctattcaacaaagacatcaacaaagacatcaagaaccttagacttagtgttgagacaactgcaagatggccatcattagctgtaagagcacctcttctctccctgggatctggtatcgttacacatctcaaccgaattcgcttccagcaaccaaactcggctttgctccttgttgtgactacctgcaatctgtaccaatactgccactcagatactcaaccgacgcgacttagcaaagctccgccgtaacaaagtccaagctcctaaattggctacgccctgtgacatagatatatacctcatctaccctgctaatttccctcatctctacataattttgaagagaaagtgagacaagaacactggttctgccattgcgacccgtctcgccgtcacttgtgctgctgcagctcgtcctgcccctccgccctaatcatctgaaccgtcaccgcttccagtcaaccaatggtccctgctacctatgcttttcgtgtcgtcataaccccccaaaggtaagtctactataaagttcacgtttacatcacctcaagctcatgccatcgaaccgacatcgttcacaggccttttgatgccattcagatcgccattgagattgtcaccgccctgattcttaccaaagaatggacagctgtagagggttctaccctttaccgagtccttgtgaatgggggtcatgatgtcaacattgtggggttagctttggagagggcatttgatatgaggtcaacgcccttcatcgcaatcgtcccaacacttcaccagtttgaccctttcaactcattatcagctagtgcagttatgtcctctaccatgtcaagataggttgcaacagcttactggtactaccacaactatcctgagtgattacggcaatagggatgtggatcaagaattctggaacaaggccgtgcaggtgcgtccttgctcttgttctcgtcctcatgcctgtccctgtgcctgaggatccccgcttcttctttttccaattcctcagataatgttcgtttcccctgacccccatctgaaaatctttccccctcaccggataagctctttactcttgctcaatttaccgttatttcaaggttgcaggcttgcaatcctctttgatgggaattgtagacaggaaatgcagaagctgggcgttcaagggtgactgaaagaagcatgaacagcaaacaccatccgcgtgatacacaatccctgacctcgttgcatttacatacaacctaccactgatcaaccaactcgtccacttagtcttaaccgccttgggcctcacctgcacctgcatattctgatgctgaccaacttgttatcctgacccctcaatttgcaactggacttcttgatggcaacgaaaccgtccacccgatcctgtaccccttaaatctttcacgggcaggctcatcatctctagcccctttgactcacagcttgacccccgtccctgatctctgaacctgtacctggcaccttgaatggcaatagattcgttgtccctaactccccaatcccttaccagcatgcgtcctcaccacactatattaggaggatcatgatctcattacaagttcaagatcagcaatgcttgtatatgggaagaggcaatccgtcaggagtttgaagccgagacggtcatagaggtctttctgaccaggagtgactttcaggaggtcaattagatgatgtctacagctatcgcatccttagaagaaagaaccaggagaagatcaccaacaacaggatggccatatcatctcctcatcgaggtccgctctggctgatctctgtgatccggtcaagaatgtatgtgggcttctcatactctacatgaatatgacagacccaatgcaggtcaatcaatacctaccagtataatccttctggctttcttactcaagcttactaatattgggcaatccagtgttaggctgctggtcttttgcgggacttgttatggtagcgtgtgcgtaaatgagggtttttatggatgcagtatatagatagtactataggtaggtatactgatatatatggtatatgatagtgctccaatgttcctctctgagagaggtctccatggctggtattgtttgtacgcccacgtatatagcctccaacacgcatagtgcacatggctatgacaacacataggccaactacattcagtcaatcacttggagtgctcgcatgcggtgtatccagacaccctacgccgtctgtatgagtgacgttaatcacatggctgacatgaataaggggtttcttagcgtcacatacaatctaaaggcatgctaagcttcatatttcacagtaagcagactttgagagaggggagtgaactggaggtgctgagttctgttgcaggacttggagctgtctctcggatgtgtatatacgtcttgacatcctatagagtcttggcaaatcccttgtattacataggtttgattgcgtgtcatcacgctctagatataccttgtacctttatccttactcccagacatgcctcttttggctaccttcaaagggtctccctaacagacctcctcaacagctaacgtattgccgtctattgtagtacctgtccaaatgaatacgtgcatatccaaagtcacagctctgcttgaattctatagaagtcacaatgttgtgcaaaacttttaccagctcggacttttttgcacgtatactgtagatatttgctgtatgcaatattgtccccaccaatttggctgactagcgtcttattttgccagtaagttcgttgcaaaactatgtcttcagcagcaaagtcgcacttatattgacccttgtgcctgtgtctatatctgcagtgtatgctcccaatataaatactcagaatcacacagcattgcaaaatgtcctggaccagaatgtatgccaatgcgttctctcacattcctacatgtgatgcgttgtgtgtgactaggatcgcatgttgtgactggagtcacacctctgtgactggagtcacgcttacgcgactggagtcgcacatcattgactcatttgcacctggagttgcacctatgtgtctgagttgcaaatccgcaacagcctagttgcaagtacactgcgagaacactaggaggacatgctcatcagaatagtatatataggagaccatctggacctcatttcctttccctctaccatgtactactttacctttacgcaagcaacatctatcatctgcaagagacaatagacatagtgactataaccactaccaatggcagcagccaatatctgttagagccacccgcggtgttgtgatattggctgctgccaatggtgtgtagccactccttggtaatagttgagtcactatgtctattgtctcttgcagatgatagatgatgcttgatgtgaaaggatgatcaatgttgcttgcgtaaaagtaaagtagtacatgagagggaaaaaagaatgaggccagattggcctcctatatatactattctgatggtagccttcatggctccacaactccttgaaacctgtacattttacagtgaatcctgtagattgtacaaagtgcaatgtacaatgtacattctacagaatgaggctttgtgattgagattgcttcctgcatccatgagccaatcatggcatgcctatttgcaacacgcggtacgacatatgtcacctccgctttttatccctgcgcaacacctccggcggagcagtacaaaggatacccgtacggaggcctacaatctatcaccccgttaccttgtaccagtttagatcatccgttatcacatacattagtctttgtgctaccttacaagtcccggagaagtactgtactgctggcagtctaacaatatctcaacacgctccacaccaggatccctgtacgcgcactccgctcgtagttcacacgaccttcaccgccacctcgtcttcctcgacactctactccgccaacctcccgaggctacttcgcctattaccgactcggggttcaggtcgtaaccctacacatgcaggcataccacttgataaaaatgtaggagcccattgttgcgtttgaactggctggggacagtgtctgcattcgtaccgttatactgtttgcatcagaaccttgagtttaagtgaaaatatcgtccctgaaggaagtcatgaagggaggtgaaccagccatgtctggagccaatgatccagcatccatgaaagagcgattgcataagtaaacaacatatcagcatgggttgacaacaaaagatgtatgcggagacttactactgtccccgctctagctagaccagtcatgcccaatagtctccccatgccttttctgagagtttccatccttactcttttggggttaggctttggcctgactctctgctgcataccatgcaagacttgtaccttgaaattataacctgacattgtaccatgaatgccgcactagcctgctacattttggtctacacatatgtaatatagctctccagcgttctttgagtcgagttgagggtactgcaaaaaattagcccccagcatctgtcacatgatgcactgttgggtctgacagtctggattgtcactcctcggggacttgttatgagtgaattccgaagcaggcccctgatatctattgattaagcttgacttacaggtctcaatgatgtggagcgggaggttatctgtgaaaaggtataagaacttgataggtagcgtacacatgatagggtaacacatatgctctatgcattgtgacattgtactgtactgtatgcttgcttgctattttgcagtgactgtttgtgacctcttttaatgagtctcttataacaaggtagggggtacgtcaaggtaagagctgcacttaaatcatctagagatacaggttgctccatactcaaagtcttatattacagacgagaaggaagtcagactcgaatagtctcctatgttttgcttccaggaatgtggcgaatagtggtaagcattaggacggctctgatttaggccattagtgtagaacatttccacttgacagatctttgcagtcagttgagcgttgaagaacaccacatcttgcatgcaaagccatggacagcaacagaaggcaatcatgtacacaagtacacaattacaacatgattggcggcaccattgcagtaagattagtgccttgtagttttctctagaccacgacaaacctttgcttcaaagtcagatggcaagcagataacacttcaatagatgttatgcagcaagctaggtagtccacataaccctccattccggacattcgcctagcagtaacacattgcagatacaagcaaagctatcacataagacatccttggtaacttgaagatcaatcagggggatcacagcctactggcaagatccaattaataccaagactctgtctgcacttagctagtggattctacagctctgctttctcatgcacctggacctggtgccatctacagcttggtcctggtattagtcatgtgagccagcacaatttaggcaatttcatgtcagcctgtaacatagggttgggcctggccttagcttactcctgctcactccatattgcatgcatcccaaactctatcattcagctctacactattactggccagagtccctgtagtagagaggctcaacgcaagctttgtgttcaatattaatgccagttgcgaattattgcaagtggactccaggtgttgcgcagcagactacagaacagcccaatacagccatggctcgagaatttgccaagatagctgcaagtgaccagtgcaatgcagaacaggtttattgatgcagtagtatagcagtcaccgcctagctgaataacctccccagacaatcctcagattgccaatgggaacacgacttatgtgtttatgaatgagtacatactgctacaagtaaagctaaaatgaccgattagtaccctgccaattacggatctgttacggcagagctttgctaagtcgcatcaggtgcatatctgagcggtagtatcggtacagatcgcaggtagtcacaacaaggagcgaagccgagttcggttactggaagcgaattcggtcgagatgatacgaatccgggttgatgtatggataaggaagtaatgttgctatgggtagctaggatcgagtgcttggttcagtacgagcgtgagacgtctactacttagcgagtgtcctgggttgtaacctcttcacaatacgtcttgaagatgcggtgctgtcgcaaatcagtaggcgtagatagaacgcgatattggaaccagacctttctagtacaagaaattcggtcaagttcaactaagtttatgtacgagtccgagagtagtcgccgcgaattgagaacaataggcgatccaagaacggtgaagcgaattcggaacaaagagaaccgaatcaagggtcgatgggttgaacacctaacaaagaggaatcgtcgtccgtgtcacgggaggtctagccgcaaaacgaaagggaagataattacgcgttcgtacgtaatctggaggtttggtagtaacactagactagacgtcaagggcagtgacctaagctcttgtaaggtagtagtaaagaagagatgaaatatcgacgcttgagctcctatacagtcgtcaatcctacccaaatacaaagccgacatctctttaagtacgaaatagtacgaaaacttcaggagccgtacgcgtcgcctccgcgcgggacgcatcggacataagccatctgcagcgctgtgacagtccgctgagtcgagatgtctttgtttgatgtagtcggttgtcgagctctaaggtctttgttgaatatccgtcgatgtcgctattgttctccgctgatggtgatatcaaatatgcgttgtatcgatagtagtgatgacgataacaaatatgcgttgtgtcgattgtagtgaggatgacgagagcgcgcgagccgaagccggcggcgtaggagccggatccgtgtcgcttcccgtaacagtatccacatatcgtcataaggtttgctatgtgtccgtccggcctccgattggttcacgtcgtcactccacgcgggtgactcgttagcttccgagccgtgtgtgtgtgagtggccgcgtcgattgcctctttgagcaacccgcttgacgaagtcctgtagctccggccgggggaaaaagcgctgacaatgtgaggccatacgggtgcggggttggctaatcagctaattatacgagagtgcgtggctcggtctggagaaagcgagttgggtgtagttgagtataccatgcctgtgtcacgactcttgacaactcctcgacattacccccgtgtctttgtgtctcccaaggacctcaggtcgtcgaaatagctcgaatggagtccctgattagttagtccgattgacgagggtcgtcaggattcagccagacttgaaatgaacgatagcgtacgactagccaccatcgtcgatcagcaccacgccatttggtttggtcggctctgcattccgttagggatccccaaatcgtcttgctcgagcccagtcaggctatgttgactgcgcaggcgctccgctcacgagagattctacacgaaactttgacacggatgatcagccaatgaacattcgcaaccccgacttatcccggtccaggcggaactagcgctgactcgagtgagaccttctaggattggaagtctcgtatgcgatgccatggaggcgatgcggattttgaactcttgtggcgacagtctttttaagccatgattcgtttagatcatgcagattgacttgtcgatatcgctgccctcgacttcgagctgcgattgccatgtaggaccggatcgagcggtatagctctcagcttgatcgactgcaaagccgatgatgcctgtcagtatatacgtgcgcgtctgatccgaagagcatctcaaacggcagtccactgcgagacgtccttgaccgagttggtttcattagggtgagttcgagcaaatcatcgctggtgttcgtaagatagctgataatgattcaatcttgtttcgaagttgtacaaattggtgtttgcttcgatgaatgatataatcttgcagaaaaacattaagcccgggataccattgacgaatgcctcccctatcccacccgggccgcagtcggagcgaatgtttactcctgacaagaccgaccatatggtaagttgatatagaagacgaccacgcaaaggtcaaggtgaacggacttaccagtctcgagtcgactttgatctaccgttccggaaagggtcagtctaatatcaaggtctttcagatccgacgccaacgtacaatgagatgttagagtcgaactctagtgcgccatagaggagcgcaggcaattggcgaaatcttagggaacgtctaggaggacgagtggccatggcgtcgatgttccaggcgtatcagctcggtggcgagatgatccgttgctactgccaaagacataccgttgctttgcgaaaggtcacccgtgcgggagatggatctcgaccggacaggaggaactgaaaactgacaacacggcggtgcaatgatcaacaatacaacactgcgatgacctgaccgcaaggacttacctactttcggttcgctctccgcctctgaaagttcctcgatgagaccggtgttcgttgtcgcgaaactggtctggacgcgaaatcagcctcgaccaatgtcaaacggaaggaggagaagaacagatgaaataccggtgtggacacaagcgatccgcaaattgatgaaatggcttcgacctcttcggctggactggatggcaagcggcaggtctgttcaggatggggacgcaggggaaacaacctgtcatcgcagcggtagagtcgagccggccttgtcgttgtcgtcgtcgtcatcccatgcccgttacgaggggtcacgggaggtgtcatcgcggcctgcctctatctaggcttttggctacgagcgttgcccttcccgcccttctcgcactcaaggcatgggccaccgccctgtcggaaggggatcagaaccgcccaggccgtcagccgcgtggacactatctcggacgcgggggtctgtcttgtactctcttcagcggtcaggcgcctcccgtctatctaaggaggaggggctgaggaatccacccttgcaggcgaggattctcaagccagaagctgcacataaatgaggcatctcctggctcgaaccgcgcttttccttgtcgggcttcagcatgtcaggggtcctttgctatcggtaggacatccagggccagtgcaccttttgcaggtggtgaccttttgcgcagcttcatcactcctcaagcggaggccaaagctgcgtaaacagctctttatgtgtgtcgaaggtcgatggtcggttgtcgttgatcgaagtcgatggtcgatggtcgatggtcgatgatcgggtcgaggaaggggatgtcgatgggaaaagaagaagaggaagggggaagtgaatgtggatggagagagaggcgagtcccggaaagtggcccgaatatatactgaccgagtgggtgggtggggcgcgaaaaaaagaatccgtcgctgcctctccctccttgcgccctgcctaccctgcgctgatgccctcagatcatcgcacgcaccacgacgaccggatgttctcgtgtttctgcctcgttcggttcttcggattctccgtgtcctgcctcttgcaccctcccggcatttgccgattctctcgtcgcgaggtcagacccactgtctcgtcattcttatctacttccgtccccagcccgcgttcgcgcgtcgcccccggctctttttacggccgtagcgagagagaaggctcccgccgactgaggccggtatccatcgatcgcgagagggatcagatcgctcgcgggattgtgaaagccaacgattcgacaacaagccaccaattccacccacatcggtcgagcaattcttcgtggcgaccgttgcacagcatgctcacagcaatgcaaaacatcgcagcaggtaccgactggttgttactttgacctgaccggaatgaaccaaagcacatcagggccatcggtccgatcatccgaatgactggtgactggccgtacaggagtcacccgggcgtgactgggctgggctatagcggggtgataacccatttgcctccgatggaatccgaccgagacctcatcagtccgtctgcatcatttggcatctggttcagattcatctaccgacagcttcgcgacgattctttcttttcttcttgcgcgtcgccgggttagttgccagaccgtcaatatgatcaatacacacgaaaccgctcagcaatcagcaacgaccaaaccgtctttattcacgaaaccgctcagccacggaagctcggtgcccgtatggacgtagcgaatcgcgatcacactgtctcacaaaacgtcggtgcactagtctgtttcaccggcttccgaatacgatatacgtagcgacggcccttctttttgtcgcgacctcaacattccgcgtctgagcgaaaccgaaaatccctcgacgtcggtaaaggccgattccacccggtcgatattgggatagctgggacgggatcattctcgcttccgctcccgccttgccggcgaacgttcgccactgttcggaaacgcctcgcgccccgctcgacttggactcggccgatttctatctgcatgatttgtatgatccttctcttgagacgcgatattgaaagatatcaactagctcctgagcaggccccgagggctttggtctgggtcgttcgatcgtgttcgtcgtcggatccgcgcggatacgttgatacgttagtaacagtactagtacgcgcgccgctctaaatcgatattcaaggcgattctcggctgcactcgatcttatcggcaggcgagatcgtgccagggcggcagttttgctccatagaaggtctcggagccttgcatagatggcgctatcatagagcggtttgtgatatcaactcgggaccgcatgtgctgttgtttatcgcggtccgatttcaccgcaccccttggcaaactgcagcgcctggccgagcgacttggcgaagacttcctcgcaggcgccgtatccgattatcatgtgcagccgttccgctaccgaaggaacaaggagaagactcgtccgacggtgacgtctcacaatcctcgggagcgctcgctgcagcacagcccaaagtgtcggctcctcgcaaccatgacggacgatcatgaatggcttggtgtgcgattctccctatgcaactttacaggcaagggtcaaagtcaagtgacaacgctttgtttttggagcattttcatactagcgtagctcgactggctgtacgaaccgttcgcttcccgtcgactaagcagaagcgcaagtgtttgatcccagacattcgattcttcgcagctagaacctttgtgcggggtgctcatgtaaggagacgatatgggctgtcgataggattatacaatggaataggtcgcatggcgccgcgcactgggcccggactgtcgatcgccgcggttccctgcggtaccgactgcccgcgtttatctggtgtacgtagaagtgtagctcgtagttgtctcggaaacttgcgacatagtggtggaagaggaggtcgcagtggtgtcggtcttggttgcaactaccgagcctccggtcgtagtggtatcaatctccgtagtagcggtaccagtggtggctgtattttcagtcaccaccgccgtgttcatagaaactgcgtcggtgccggtggtcacgataccgtcagtgagcgtggtagcaggctcagtcatcgcaccagtaaccgcagctgtgcccgtagcagtggttatgccggctgtagtgctcgtcgtggccgccgcggttgtgttgacggcgagatcgacggtcgcttcggtcgcagcggccgcatcgcctgcaatggccgttggcccaaccgaagttgtgtcctgcgcaaacgttcctgacatcgttccaaacgcagaaatacattctgactggctagcaagacttaccatctgcgtcgcaaccgtgtccatctgtcctgcaagcttcaaaggattgtgatgacaaggttgaccatcgggcaagtcacaaatcgttcccttagggacaacctggaagggaacagatgccaggccctctttggaggcggcctgcctgtactcgacctgccctttgcattcaaaccaaactacagattcctgttcgggggttggcaaagccgagacaacggccagaacctcaacaaccgcgaaaagcgcgccgaatttccacgtgagcatggttgatgtagtacgatatgaagtaaaagtggctgaaagcggagtcaattccaagaagtcgagctgatggtgttagtcggtagtgcttattgaagcgtcgtcgatatgagctgcagttgctagatcttagcgtggtaggccgtagttggcttcctaaaattgttatttcttagatcaagtccgcatagggatatctggtcagtaaagagcgtgtcgataataggctcagagaagaaaacgatgaaatgaccagatctggactcgcttaaataggcatcgacgtgctttcttacaagaggatggtctcacgatgcgcaattttgtaacctcgatggtcctttgataaccgatccacaagcccctccaaggggtctcgacaaactgtatgatgcttcctttgccactatgcagtgctatcggtttgatcggtgatagccgttccaacactctgcttcacgttgcccttgcttcatcgagcaaagcctttcttttcctctccctgatctcgcgcgtcagatgtcggaagaccacatcgtccgtttcgtcaagtatgctcgttccctggaatgaaggccaaacgctcagaggataagcagagtcttgcatcctctcacatcgaaataacgtacatcggcctcgtctcgtagtttcatctcgcccctcgccttgtccgcgtcggtcttatccttgattcgacctttctcgtcgcgttcgagctgacctctcaacgccttgatggttttcggattcgacgtgtcgaggttggcgctgtgcagaaaaaaggcagatactttctagatcagcacatgggctggatgtacgaaacgtcgggcgactgacttgaacatcgagatccacatttgcagtctttccgccaatacccccttgtccccgtgtgtgttgagcccataattctcacaaatccctctcaattctttctggctagccaagtgataatttggctttgcaatgcgtttgcaatcttcaccctcgtcgtggctcagcttggtggatgctttcggattggtggtccccgcaaacagtttctcccaagacgtcttggtagtctgtctcgccgacttcgagctaccaggcgtgtcctttgcgcttgaacatttccggtcgaggtgcgcgttgatatccgtcatcaagaccgacctcccacagaccggacaatcgatgagatcaccggttcggtctttcgaacttccatatcggacgtcgtaggattcggtgtcagaactagctcctgtaactgacacctggtcctcgacttcgatctcccctgatccagctcgatccgaactgctcctcacaccccttccaacggcccgagcgacctgttcctcttcctcgtcactttcctccaggagatccaccacttcgatgacgggaataggggacggcttcgtagccaaacgagaggcggaagaggcaacgacaggggtgctccgtttgcggtcgcgtttcaagggtgagatcacgggagtttggctatcggtcgatcgtttccgcttgagccggttggtagcccattccacgagctcgggtctatctcggatcatcagcgatcgcgttagaacggaattggagatgattaaaagtggcgacaggactgacctgacgctcgaccaactttccacgagatcttcgatcagcctattccgccgaatatcgctctccctcatcggctctttgcatgtcggacacgtcttgttcttggcctgtatggcatccctgatgcactgtgtcgaggttgtgtaacatagaaccgataagaatactaatgataacaacacaaagtgctagtagactcactctggagcagaaagagtggccacaaaggatgctgacgggcgcttcgaacggttgtttgcagatcgagcaggacaagtgttgatcgtgcttgctgagcggggtcgagggcggaaagtccggaggaagtgatgctagcagggtatgtaggcgtgacatggctggctaatacgcaggccctattgatattgttttcgaggagagtcgagccgagggtgagtcgctcgacaccctgaaagctctgcttcttggatcgagatggaccgagagatcacctcggccagcttcggccctcgggcaaatcaacaacaaagtcgcgtcacgtcccaacgcgtcatttagcttgagaaggcaagatcccgctgtcaaaacgaagcgcaacgcatcaagcgcatcagtccttttgacgtttcacgcttgatcatccatcatcgtggttcgatcgcatcagatcatcagatcatgacaaacgactcgcgactaattccgaatttgcagtgagcgcttacgtcttgcttcagatcggctatgttgttcgtgaagttgatcattgaggctttcggtcatgtaggaggcacacgttcaggcaggcctcactatgagctatgagcgggagcaggaccgtgtttttgcgtttcaagttgcgacgcgaatcagtcatcggaacaaagccatcagattcaggtcatcgcatcatgccggggcggtcagaacgaggcagagatgatttgttttgatgattggttcattattctacttcttctatttcatcaaaatgatgaatcctcctcccttccctgccgttacaggcatgaatggcccatcatcgaaaaacaaacaacaaacaaagatcggaattcttttgattacgcgcttcctttgcatttccccaccttcatatacatagagacataaacaaacaacgaagacgacttcgacaaccacatattcactcgttcgtatcatcgtattcttcattacctcaacaaattcgacaaacatacccgcatttcaacatatcgatatcacgctcttttgacgaccagcatcacgctgactaaacgacactcgcccttcatacaatcttccatctaccaaatctgcctcgctgtcgcacaaattctaccgcgtcaacaaccgtgcccttctctacaccttgaaaattgatatagtcattcccaccatcaattctacctgccgacctatacttctcagtgcatgcttgcctgatttgttcacgccctttagaccccatcatggcggactcgaaccgtcaacaccggccggaggaccaaaggtacctttccacaggtaactccaaccaacttcaacaacgtccccttgtcacccctctctacccttccagcctgtcgaatcgaccggctcaagccggacggcacccctctcaagttcacccttatgccaggcttcctagccaccgagacgtctcccagcccaagagtatcggacatgcgaccactatacgatcggctctacagcccacgtctgcgtcacagaccgtcgtcaacgcgtctcaccacgcgcaacaaggtcattctcgcgagatctcccacgttcacaatccgggcctcgacgcagctcccgttggtgtcaccgaccaggctcgacagcaagaacaagaaggtcttcagggacttccgcgtcagaccctacataagcctaagtccaagcttcgacttcgactcaagcttacgcctcctcatcctcctggcaccaaacttatgattccttcagctccgttgccaaagcatatcaccaaggacgatccgatcttggtcaaagccttgaccaaagtcatttctaacgatcgccaccgcgaaggcaaggagaacgtcgagagtcgtaattatcaggactacgctgggaggaacacccaaagagattcgggcatgtcctttggcaaccctaccaagtctagcggtttcgacgatctcgacgcggatggcttctaccctccgatccacgcgcaggcgagggctcaccaggcgtatcaacgcgctcaactcggacatggtcgagctgctccgagcgagactgtcgggaagaagccgaactcccgctacccttccaattctaccaacgatgagaggatcaaggctttggaagaagctcatcttcgacgagccccgcctgagccacccaaagatcccgttttcacgttcaagcgggttcaaactgcgccgctcaactccgccgagggcagggattcggaaggtagattctatcaactagatccgactccagttgtcagcccgatccgagtggaaggagcaggtttccagacaatcaccgcggcgacacctcgacctgcggttcacgagacggaaagaaaatctgaagttcaacgtgataccactcgcgccattcgatcaccagaaacttctgaatccgagacgaccatcgacctcagcttgacagtctctcgggcttttgagtcggaggatgaggtgctggacgtcggggtcgagacctttgcgcaggaggacgtgtcgcgattcgacatttcctacgctgaatctcacggagcccatggcgtccaagtcgctttccaagagaccatcgaggtcattcacaacgaccgatctcccattgaacacgaacaagagacagaggctcaagctttcgctcgtgctcaggccaagcataaggacatcgagtcccgcaaccttgacgacgtcaacgatagctcgtttgataactcgggtgatatcagcgcttctcgagatggcaatgagacgggttggaccagcacgagcggagatgacagcggtgttactgaagatgcccgagagaagagaccaaacaaagacaagaaacagactggcgagcagatgaacgacgtcttgtcggtaagtgctgggctctcatataccgcaggaacatccgcttacccgcgattatcagctttccgacctcatgctggctgacagattcgaattccgtcatgaaattggttttggtaagtacgaagcgctcgcttgatctgaagccttcgcttactatgcattgatatcctgcttcactcaggcaattggggatcggtatggtctgtcaggcctcgcaaaccggagtatcacccatatcacaggcaacaggatgaaaagcttccgcctgtaggagctgctatccgttcgcagcaccacatggaaaagcttgcggtcaagttggtccatcggaaaaaagagccgactaccgctgcccgagtccgcgccttatggagcgagatgaaagtgatcagaaccctcaggatggaccctcatccaagcatcatcggatttgattcgttcatcatcacccctagttatgccctgtcagtttcttccctttggtccatcgaccgttagcattctgacttacgattcggattggcagagtcacgatgccctttctgtctcatctgatgcctgtcggtcttccggaagcaacggctcgatcctacttcttgcagcttacaagcgcgatcgcatacttgcacgatcacggcatcagtgagtggccatactgatgtcaggattccttggattgaattccagcctgacgcaaactttgatgtttagcccacaatgacatcaagccagccaatatcctattgtcacacaacgacgtacccgttattgtggactttgggttcgcgcagcgctgggatttgtccaacactgacggtcgcggtccgaccgaagtcagcggcctggctgtcagctcaaatcgggctggctctcgtcaagttccgttttggagcgagattagttggggtactcccgaatatctcgatcctcccgtgagtcttaggtgtagatccgatctcgcatggctacgactgaggagagatttcacccttagcgcgcccttggtcaatggcatgacgagcgcatgtcagatgtttgggctctcggtgtatgtcaggattcgcaccaggaccacttgagatactgctgacaagcatcaactcccgtagatcacattcttcgagatcttgactgggcgcactcccttcgaagcccatgctagcgaagacttttcaagtcaagatcagttgaacgtttattatgaacggacggtccgaggagagtggctcggggaatgggatatgtcggtctgtgagtctagtaaggggatagcacgttcatattgggtgctaggctgattgaagctggaatttagcaatggagcgtcttctgaaggcgatgatctgccctgatcaccgcaagcggttgacagcttcccaaggccatcgacacacagctcttcagccccagcacaatgcggaacaaatgagtactccacctttcgtccgaactgccactggacatcatgaacatcgcgctaaaagaaggagagagccacagcctaaagcgaggcctgcaaaatgtcaaaaggtcgaatcttccgcgcccgtcgaagcaaaagacggagtgagcgaggccgacttacgcaagggcatatctcccgctcgcaacacgcccatccgtgcttccgatctgctcactccgcaaaagaagcctacgaacagcaagatcctgattgtcactcccaaagagacgcgcgagaacctgaaggaattcagtccaggggagagggtcaatgaccagagcgataagtcgccacctctctctatggatcccgatatgccgcaagaaaaccctgccggccgcccccggatcaatgctgtgtctacgattgaagcgcttggtcaagagcaaattcgaatccagcatccaaagatggaagaggaacatagagacaagaacatggagaaagtcaagtcttttggtaggttttgcggacgagctttttcaatcataccacccccctgatgcactttcactcttgatacaaagatgtcctgcgaaagcaaccggtagtaaacgctgttgagtgtagctctgtgcgcacacaggagctccaaagacctgtctccgccatggcattgcgaacccataaccaagaaatgccggatagtgatccctcgaaggaatatcacatagccgcgccggcaactcatagcaagcgcgaccggcgggtttcgcaacaccgacgccacactcgaatcgtgagcgaaggttgtctacgagctatgatcgaagccccgaaggtagattctcctgatgttgtagaggcacaaggtcagccatgaccgtcaatctgcctctcggatgcgagcctgatgacacggtaccagcgatttctcaactatcagagccaaagctcgaagcggagcatcgacagggaccggtcgccgaacaaccacctcatagtaagtattcttgaccatgtcgaaaagccgcggactactgacagtaaatcaaacgctatcagaatacacgtccgccatgatgtcacgcccgccaaccggtggcgattctgagacccagctgcaaagtaggtttacggtcatcgacgacacgaagcgccacggctgacatgacatgtcgaaaaggcttagtgactctgctggattccaccgctttggatgagcgtttgactgagatagcttcctgtaagcgatgatgagaaattgatgcggcaatcgatcgtgctaacatctcgcacggaataggggtgaaatccgtcgagcgtaagtatctcaatagtgaacacaaagcacagaggaggtctgacttctaggccgtctaaaacagagcttgtcctcgaagcacgcatgccattagaggaggctcaacatcccagaagcaagacacctgtggaattcgaacgaagcatatcccgattgagcaatctgactaaccgtcgaagtgtcgacaattttgtcaagctcgccaaagatgcgcagccaacaatgcccagtcacgccggatcttccaaggcaccgactcatcgccctagtatgagcatggagactggaccttcatatcacctgcgtaggcaacgttccgatctcaccaatttcaggagtatgcaattccagccaatagtggaacaggaattgccagagagcagtgagtataactgattagtagtccggtgtcggcattcaagctgataagcttggtgacgacagttccgccatcgggcttgtggtcgactggcaaagccgccatcggtctggatcgaaagttgaagtctcaccgttctaccggtgacctgaacaagatgatggcgatcaatcatgacccgtacgaagatgccttgcagtctcattcagacgtcacccgtcttgtgagtcgggttcgattcgataaaggtccaggccagcaatctaacaattagcatcttcgaagcagggtgacggctggggaagttcacgcgtcattaacaaatctggcctatctctcttcgctcataaagaggacggcaggagtcgagcagcagatgcaaatcatcaatctcgtttcaagaacttcttccgagggattctcaagcgctagtgaaatggtatatactacgatacagtccaggcgtacacggcgttgcctctacaaaggtatatatgttcttgtgttgtatacaggtatctcgtcgcgatatggatctcttttccatatggacaatgaatcatacgggaattcttgcgagagcctgtccgggtggcacggcaatgatttcgtctgctcgtcctttgacaatcccgacaatctcgcgccagtccgtcatggcgcctgagcctgattttggtctagttaaggtcgacgttcatagtggtctggtttatctctcactcacccgtatcgccacatgccaatttctttcccatctgagggcccatcaccttgtagccaatcacgttccgtatcgtcgagatgtgactggccgtaagaggatgctcatacatgagggtgttcattgcgggaaacacgtaggtcggtgtagtggggccgagtgccctcattaaagaagtctggcatcgaatctcgtcagccttgtaacaagatggacgtcctcattgagccaaagtcgacgcactggaaggttgtcgcagatccctccagcaatttttgccaatgtgtttgcgtcgcaaggtgcaaccaaaacgatgtctgcccatcgtctcaactgttggaaaaacatcaaatcacggagctaagtttaacacaatgaagacccgagcgtacctcgatatgtagtattggatcccccactttcttccaggactaataaactcacgagtacccgatcagcaaagcgcaatcgaggtggacgcagtccactcacgttccattcctcatcatcggtccagatttgacaacgaccgttactaagctgcttgacagcttgagtggcaaagaacgtgagtgcaggcgttgttgcgaccacctgcacctcgatgcggtcatcctgcatacgcgcgaaaggtcagctctttatcaagaggagagaaggagatctcgactgacttcactcagtgcttctaccatgagaggtatcttgacactggctacactgccggttgcaataagcaatacgtgtaccttgcctggaacccgccgctcctctgctttgaatcgcccttgtccgtgttccgagtcagcagctagctcagtcgtcgttagaggccctgagaaagattcgcaatccaataagactcacgccggaggaagagacgtcgaagacaggacttaccggcagcagcagtagcgggaggtgtaggaattaccacttcgagccttgcagccggttttgtggtctccttgtccgtaccaacgttgccacgagtcggagtcgacgattcacccgccgcactgggtgcagacgatgtccgcgcttcacgcttatcaggaggggtcggcagcacgtagatgcaatcttcatcgtcctccaatagctgacggctcggagtgatcaaagatctggtcgacttcaagcgcctattcttgcccggcttgggagtttcatggggaagactctgtgattgggcacgacgaagttgtttcttctgtcttcgagtttttgggacggattgacttgctgcgacctcctgactagcatgcgaacggagacgacgacttgaagcggaagaatcgtcctctgctttgcgcttgagtccgcgttcttgttttacctttggctctggagtcacctgcgtagtctcgattgacgcagacacgtccgcatcatactcgccggagtgggccactatctcaggcgttgtcgacccagtcggttcatcatctccgtcatcctgtttcaggcaaagcgtaagcatcagtcgttgtgcgtgtcgtacgctatctgtcaaggaattaccgctggggtcataagatcaaaggagatatcaatcttagcttcgtcctcctcagtctggtcggtaaagccaagcgattctttgatgatgtcgacttggtcttccggaaagcaattggagccaaatttgtcgtgacagacatgccagaattcttggcacgggccattatatcgaggctcgtccgacattagcaggggcttgaatgcattgccccaagccttgatggctgcgacatccgatgcaacctgaccattctccaaacaagtcctaattttgcagagcagatccaagcatacaggcaatacttttgcgctttctttgatggtgttgaccccgtaatcgatcgctaccatcaaggcaaattcgatcctgccgatgttctcggctgccaccaagccatcagccccgatattcgaaatgatgctcctcattaggggcagggcatgcaaattgtaaacatcgcgctcaaaggaggggacccttgagaggagggaagcggtccaagcgatcaattcagatggcaaatcaccgtctttttgggcggttaagaagataatgttggctgccgacatacgggaggtgaccgacctagaaaacccacgtcatcctgtcaggtacgctcgtctgatgcacaggcgccacactagcccaacatacctcacagatccaacctctagactgatttcttgcatcaaggaggcgaacggttcgtatacacccgtgaccgcgttgatccccttcgaaagtgaccgagatatggctacaccgagcagctctcgccatatggagaacaggttgtccttgtctccacccataaacgcgtcgctccaagattcgctatgaagagttgaacacttagtccacgtttaccagccggctggaatctatgtacttaccggtacggtcggacgagaagctcaacgagcatcctgcaagtgttgttggaagaagaagcacttcctttggacttattcatgaccgagatccaacgcgtgcctgcggaaaggttacgcttaattggtcaaaaggcataaaaggcttgggcgcatatactcacagagtgtcgtccagagcgccttccgtatactaggaacttcgtcatggaaagtcgcaaacgtgtttgtcaagttgcccaagacacgtttggagactgatccgctttctagtgttctgacgagttgatcgatgttctccaggtataatccctggagttctgcatcgcttgccaaagctacgggcgggtagctggtcaaccggtgtaagagcacgccggcaacgctcgttccacctccttcatcgatatccgcaattgtcgcaagcgatagatgagtatccgatgcgccattgtcaaataccgatcgagggaaagccagcttgcgcgtcgaaagcgtctcgggacccaactctcgtatgaggattgagacgaggtcctgccatatcgccaacttgaccttttcgagccgaccatgcactgacgtcaatgagccagccggtatgtatttttccggttgcatctcgtcaacatcgatcaagatcgccacgatctcgatcagggcctggccatacgacgcggtgtctgagagcgatcgtatgagcatatcagcgcaagttggcctggaacccgttctagtaatctcaccggatgcattctgcgcaatggcctgaagcatacccgtccagatctcgaccaagtgttcctgacatgcacattgcggacgggtctggttagacaaaatgggagatccttccctgaaatgaaagcggcttacgggtagactgggatcagcctctagaagctcacctaccagcgacccatcatgcacactatagagacctttgaaagattgtcggaacagcctccccagtctcgacgagaatctagaagcaatccaggtcgagggcaacgagggtatgtcttctggttggactctcttctcggccagggattgagctagttccaggagtgtttgttcgcggcctttcggagcgatgtcaatgttggcaacctcgccttcgaggtatcccaggtgcagcaagctgtccaccttgtccgtcgagatttcattccgcgtagccgggcgcatcaaggcagctaatatcttgaaggcttcgatcttgatccagtcgacagctcgaactgcgatcatgttttctagaaccggttcgatcattttccagagctggtcgaggtggtgatcgcgggaagtatgctggttttcaaccttcgcgtcaggaccttcacgacctgagacatcattcaagatggctgaaacacccgcgaacaccacgccaacgatttcagatccgcaagcctttagatatgtctggctcgactccgcgtcgagacgcttccaactgagagtttgattgccttcttcgtcggtcccactgactgtgaccgcatcagccttcagacgaacgagctccttctcgcgcttccaggcctctgctacgagcgacatcgcggcgccaagcatcttctctccaagcgaatagactaggtcgtagctgctgcacggaagcccctgtccatccaatgttaactgctttttgtagttaaagatcgcgtagacggtgtgatcgtatgcgaaccgagaaagccatactcgaccagcggatggttgggcggtatcctgcttgctcagaggagcctgttagtcgaagaagacgcagtaagccaaaattgctcaatgtcgaagactacattgtcgagaccgcacactgaccaggataatttgctgcatcgacttgtacctttgagtatcgttgatgtagccatcaccaagaagtgtcaccaaacaggaccaggaggcacacgaccaatgcggatcgttgatcatggtctgcgtgagcatcctttcgacttcgtcccagacgaccattcggcgcactccctcttgtccgtaaggcgcttttgatacgcgtttcaattgttgctaggccgaagagcaacgggagaagagtttgtaagcatgactggcatgtgaaccattccgccaccgacttcactcacaacagtggtcgcctcagactcaacagccacgtccttggccattctccacttcttttccgcttcgagccggtccgattgccattgctcctccgactcctcctcaccttgcccttgcaagacgatcgttctgaaggattctttcgtttcccttatccaattcaattttcctctagcgaatcctcccgctgcagcggaagcccttgctctgacctgaggattggggtgcactagacccttgatgatctctggaatcagatctctgtgatagggcaagaataccgacggatagtaacggcacatgttccagattgcagagtaaccctccatcttggctttgacgtttccagtggccggcccttcctgctttgcctggctacctcgccagaactgcatgccaaactcgccagtagcgttgagcagtgctcggatgactttgctcgtgatagggatgaggcatgcggtcggcacacgtagaagcgagagcacgtagatggcgaaggcatatgtccgcttcgagttgggtgtgttgagcttgggagtcgcaggaatgacaagggtggtggataggagactagtcaagtcggcctctgaaaagtgctcatgcaactcccgatggtatccgataaaggacaggaccttcagtgccgcctgaccgactcccgctgctgcccgtctttctcgcacttcagcttcagaatagccttgccgtctcggcttgggcgtgtcttcattgtcagaacctgcggcattctgaggcgacggtgaaggagtggcaggagcttccgtcatgtcgggaataggcgaggaggaacccaaaaatcgcgtgtccatcgtggcaggctgtaccagccgcttgatgtcccttgtcaaggctcggaacacgtcggacgtttgcgagcggatattcttcaagatctcctcccgttcttgctgctgctctacgcttcgctccagccgttcggaatcgtcattaatcacaaagcacttcttcagtcgtgcgaaaagaagcagatacgcgtcctcgacggcaagcaaatcgtcgagctcgttgaggatgatttcgagtaatgagtcgattgttgatggagcggaaactagctggaccatttcgacatctagcgggttcccgtcgtcgtgatcctctggctcttggtcctgaccacccatgtgttcgtcgtcgtttcctgaaggctctctcgtagtgtcccggtcattctgatcttcttctgaggtatgcgtgtgatcagagctaggcacctcggcttcacggaatccctgatttccgccagatcccacgcccgacagagtgttctggctagtattaactagaggattacttctctccttgttgacggcgaaactatccctgacctgcaagaccggtcgaccggttttccggcccgactgacgtaactcttccgcgtttcctcttgtcccctcttcaacactggccgccacacgaatggggacgagtcgattccgtttcaggatagatttgggagtcgaagaagaggctggtaagacgtctccggctctaggggtgcgtgtcggagattcaggttcggagaggccgtcagcccggtcttggtctgggccttttggtgtgtagatgtatgatcccggtcgggcgatcgtcctgagagacgtggaaactcgagcgtccgatcgatacgggtggtgtcttgcgtgggggctgaatgtcacagttgggcggacatgcttgcctcctgaatggatttgggtagtgcgaacaccgaacattagccagcaggacggatgtcaccaatcagatcagactcaccgccgaatctatgttctccggcatcagcttgccgttctttccgtttcggcgatgaagatactgttcctcgcgttgtaccgttatactggacacggttctcagtaaagacgtcgtgttcaatgctgatggggggctgcatcgagacggtcatgatggtctgtcggtttcgtatagtcgtgatttcgttgatcgcctaggcgcgattgggagtcgaccgatttgtggaacgttttttatgtcatccaagaaggtaaccgagcaagagtataaaagagctttcaatgttcagggccgggcaatagttgacttcgaggaagtactgtttccgagctggaagaaggggttgttaacaaagaggtccatcaaatggcagtgaccaacatctaagggatggcgacggggcagacgcgtcgcgattgacgcgtcgaaatggaaatgtcattaaaatcacgtgatcatcacaattggacaaagcgattcgatcgcttgccactgggaggaaacagcgcagaatccgctagacaggaaataccccatgcccctaggtagcgatctctccgtttagtacggctactcatccgggaccgtagtaaaggcagccacacgagcgttgcattgttgcacagcgcgaatcctctcaagcagtaataaaccatccgtgtttggcgacaactatctcgatacaactttggctttcactcttgtttgttggcacattaggtctctacaacggtcccgaactctacaaacggggagcatctctgttcgtcgatataagaaacgtcggtattatatgtgatgtgcaaaacgcactcggttcctgccccccacgcgtacgccttctttagtcacgaaagtcgaccagggcggccatatcgtcgttcagaatctggtcggccattgccgagtcttcgtgtcctaccgacgagggggaagccaagtgcttgccaatctcgccatgagcatttccgagcgcccggagatccaactcgttgatagatcgtaggtcatctgtgcccaggtcggcaaggccgctgaacgggtcgttggcaccgcctacgccgtaaaggccctgatccatcatatgagaggggacgccaagttgagactgcagcgcttgcacctgcatcatcagttgctgttcccgagcagatttgatctgtaacatttcttgcaattgtctgccagtatcgatcgttagtcagaagcattactgtggtgactatcggggatatcaccggactcacttgaccaggtcgacggtcaggcacaagactgtacccttacataacttgtccggtacttgagctttcttgatgaccttgcggttcctcggtttgatcttcttgcctttcccgttcaacatttcgagcggtttagagtccatgttatcctcgtcctcttctttgatggattcgacttctcgcgcggcaatcgccccggcaacgacgttgggcggtagcaacgtctcgagttcttggatcttctcgttgatcgtctcgcgtcgtttgcgctcgacttcgttatgcgaaagacgccgcctcgagatccgagctttggccaattcctcggcgctcaggctacgagatgcgcaaggattcagtcagccgagcaatcaatctgcttgaagtatatccgactcacatctgagggctatcttcagcatcaccgtcttcgatagcagcttcgtccaccgtagccataccgtccccattcgacccgctcatgccgaagctgatgaggtctggtcggactgcatcgttcatcgaatgtcgtcgccaagtcccctcctcgctcttatcggggaaaactcccagcgtggaggcagacgaaggagtacgagccataccagaccgtctctgatgcgccatcgtcatcatttgtgccgcagaatgttgtccatgcatatcgcccatagatcccctgaacaagggcatgtccatggcgccgcgttccagtgccatggcagctgaatctgagcgctttcgttgagcatcagctcgcggcgaaccgaaggtcgcctcgagcgaaggcagggcgtagtcgaactgtgctggagatactgtaccattgccggacccgggcccggatgaagaggacgaagcaggtccaggtacggatgaatttggaacccgcgtggtgtttgacccggtacgtttgtgagtgggacgagtcttgctaggagcccgaggtgctttaccgacccctccattgggtccagtagtattctcatttcggacggcactcccgccagatgcagcagcggcaatggaagaacttctgcgagcgagcttgggcttgcctttgccggccttgtctccgctgaccccacccatcttgctcgtgctcttcgttcttcctcggctgatcgggatcttggaatcgtcgccattcttcatcttgatatcgccatctcgatcgtctccgagggaatctgggcttctcccgctttcaccagtcccatcgccgtgaatcatcacgctaacggctgtgtccaggtcgtcgggtaagtcctcattacgacccgacccgcgataccgaggcaacatactgtcatggtaaccgccttgcccggcctggccttgcatttctccagtctggaacgtctgcctatacccgtccgacactccccatttgcctcccatgatgctcgagaacagagaagcgttcccgaacgacgacaccgacccgtcgacgaggctaggcgttccctgtccgagccggcgcgacaacgaatcgatcgagtgtggcgtggcatgctggccttgggaggtgttagaagatccaacgggaatacctttgctttgaagtgccatgtcgagaccatgatcgttgccacccaggccgctctgagggtggtaagaatacccgccgtatcccaaagccgacccgttgccaccgatcccaccgagtcgactgaaatgatcggtctcagcccccagccgtccagggaagtcgtcctggaaagcagcaggtgcagatgctgggaaccctccgattgggccttgagattgatgttgacccgggatgaacccctgagggtcgatgggagcataagaccccctcgcgttctggttttgctggctgacagaaaacagcttggccgccgcgtccgtctcagaggtgaggtggtgctgatgcaaatcgttcatcatctgcctgaactctccgttgttcgcctggtctggtttacccggttgattcggttcgtcgggcgattgagcgttacccattaatgccaacaggtcgtcatcgtcaaatctggccgagctggtttgataccctcctccccagctggtcgatccgggccggttcccaaggttcatagggcctgagctgttgttgcccagattagtcgaggtggacgtcgaccccatggcggcctggtggaactgctgagcagtcatactttgcaagtgttgcaagaattgtcgatgagtttggtgcaagctatcgcccgaattggtttccatgtcccccgggcgagagttgggcgagtcttctcccgaatcatctaaacccatcccaagcctagagacattgttcggtccgagcgtcgacgtgtcctcgccgtccggtccgaatttaaagtctcctacacgttgatgctgctgttgctgatgctggaacgacccgacatacttttccaacagcccctttggttccatgcctcgtttgtcatcagcaccgttcatagctgcgacaccaggagaattaatcatgctcatgtcgagaatgtcgttggtgaagtcgaggttgttgaagaaggacgacgagtccatcgctccttgacgcgaagatgttgatgtcgattgatgatggccttgctggtggccaaggtgttgctgctgaaattcacttggcagggaatgtctaggagaagcgatatcttgaggggagaactcggatgtcgaaaacgtctggtgaagaggtgtctgcggagctggagatgattgaccaaatgaaaagcccatcgtattgctggtagagttgctacccgaggtcatcccaggtgaaggcgatatgctacatggcggaaattgacgggaagggccgttatatccagcagggtcggtaccgtacgatagattaaggtcgagggaaggtcgtgatttttcattaatttcgcaacacaagagagtacgataatgtttgatcggaagaagaaaggagatcgcgtcctttagcgaaacccggcttggaggtagaggaggtagcgattctcgatgcgaatgacgtactcgaagccttccctcttgattctaggctggtgaggggggtcttcgtgaatgccgactttgatagatggcggttcgagcaaggcaaggaggtcgcacgggatgtggacgaggtcgtcagcgaggttcggaccatgtggcggtcttgctgatctcaagaacagctcacccattgcgctcaatccctcttcaaagctgagggtttagattccggcgttgttgcttaagcagaccgtccccgatcttgaagtagatcgcacgttgttccgatgtacagaccggagtaaggaggcaagtccttgcacagtaatatgattcgacaagcgatgatgtcggtgttcggcgtcctccgagtttcgtaatggcagcagatggtcacgtcgccttgttcagttatttagcttaaagattctccttgccaatctactaagctactattgtcaagtactgtagttcgagttggctcagagccatcgaccatatgggggacgaaggatatgtgatgaggtttgtcagactggcggcagtgaggcggtggacaacgatgagagaggggaggtcctcaacgaacgaacgaacgactgctagctcggttcgtctcccctcacgcccacgaccgtatttacatccgcatccaccttgacgcccgctttcccctgatcctgctgcttcaccccgttcttccccgcgtcgatgcccctttgcttcgaaccggggctcccacgccgagactcgaaggggtaaatctcacgcgtttttagcgctcggcgtcgaacacccgcgggatgggtcgggtccggcagccttgataaaaggtggattcgggctgaccgaatggtccttacaaacaattacgcaaaaacgatctgcaaagtccatgattccgttgagcggatcacttgcgatcatgctcatttggccaattaccattgtggcctgggcttctctccagcgtgtcatcccggcagcgacggcgatcattatcgatcagagatatacatgatgaaccggagatcaatctccttagttctttttgtagctatttaccttgatcaggagcttaacagcgatggccgacactggctgctccatgcgattggcggattatgagtgtgcatggcggtcgaaacaacagaagatcggcttctgtttgtaggcctaccaacgtctgacgaatcgacggcactcccgccgagtcatcccaacccatttgccccgccgagaacagctgaaagaacgttagatatcactaaaccagtatatatggccgcgttgggaacggtgacctttcgaaatcatttcatgtatggtcaacttgcactgaagctcatgatgtgctttccaattctgcgacgacactctcccagaatttaacctctccctctctcagtgttccttcctcgagctccgtctcctcgacgaatcgctccacgtcgatcctcgcaatcttgcgctcctccgagccttttcccaacgccttgaccgaagtcaacagcttttcggctttcacgggtgctggcgccggccctgtagatccgatccacaagatcctcaacaatgtcaagctcgtcgtcctggccaatcgctcgtgatcccatccctgcgtcggcgggatcgtccctgtggcagctccgctccccagccctatactcaaagtacccgatcctgcgcctatgccagtctgctctgtggctaagcttccccatgagagagcgacgagggatcggttggcgtacgtctctgcgttcttcagcaaggtcgcccggttcttctcggctgcggcgagtgagaggaaacttcttcgcagtgagacccgtgagagttcaagcgacaaagaagcccgggagagagggttggtgacgaccgagaaagggagttccaaggcggccgtacaggcttgtacggctttccctaagtcgtcccatgcagtagccgggttctctgtagcgttcaacctggacgaggtcttgtacagttcgatcaaggtgtcgtagaatgccaactttgcttctacttctgccgaggcaaaaagggcgagctgctgcagtgccgtcgtcttgttcaagcattctcgcacgattcgaatctgaccagccgatgtgggagggacgatcgttcccgtagtgaggtcgatctccatccccagaccaacgaggatgaggaccaattcgctctccttgacggtcagcgagatcgagggcgactctccgctaatttgcctcgctttcgccagggcggtccaagcgtgtccaagcgttccaatggcgaactcgctggagagcacttcgggagaaacgtcgggatccaaagcgcctaacatcgagatgtcgacatccacgatcagcaagattgcatcgattagagtcatcggtgtcgggatatgttcttcgtacgaagcaactcctcctggtgttgaggccctcgacatgtcctgatcaccatcaggctccggctcgtcgcccaatacgtccgatttgaaagcctcgattccaccttgcgacgcaatgtacccatcctgcaccctaacaacatcttccagtagactcctagcttccagtctaatctccgtgaccctatcctcattcagatagattggcgaccgagacccgctggctgcgccgggcagctggaagtcctcggcgatgtccgcgaggtcgatcagtccaatggccaggttgtaggcagaatccgattcgagtagtgggtcgggagtgatcgtcaaggcagttcggtagagttcgatcgattgagtgaggagactgaagtgaacggttgtcggtggaagcgtatgatttgtcgctaggatatagagaacgcgagctctgaccgagtcgtgccattcgtcagattcatttcgacaggccgccaaccccacgagtactgactgattatagacggcatcgtacgttctttcgaacgtaacagtctctttgtacagctctaaagcttgctcgtagaatctccgtgctttatccccggtcctaaatttttcgcccttctcctcagcgtccactccggctgtgaggcacgattagccagagtttggtataagtcgtcttcacagcgtcttgttctcaccttccatgacatcgtcatacgagtctaatgtggcttgttgcggctgtctccgtttcttgcctcgtccagcattatcgtcgtcatctcgctgcctcctgttcttgggtggacgtttgaaggtggacatgccgctgcgattgaaggtgggcagaagccggcagcttacgtctcgttcgataatggcagtgaattcttttgctggtcaccagcggcgggtcagtgagaacgagacttctagcttatatcttctgagcttctgaccttttgaaggccgttcagaatagccgatccgcagatgacgatgccccctcgaaacttcatccggatttgcctccgattgatccatgatcgcgaggttattaatcattcagaatggtgaagatgcctgtacacctgtgccgatctgaagtactcgtatagtcaggtcaagaacgacaagcagcaaaccaaaccatctcgttcggaagagggcaacgataagttgtgctcgatcctatgagacacagcgccaaagcgattcaccacacgcaagaccgaaaagagttcactaccatcctataacacaacggatccgatcgtcacacaaaggttccgacgcttactcatcacgacgactagacgcttgcgattgagattgtccggctcaaagtcgtttcgccatcatcaattggtcttgtgattctggcagacctgtctcataacaccgctatcatttggcttgacgccgtcaacaccgagtgcttgactacccaacaaaatataggcccagcagctagtgcgacagatcgaaaccctacctgcccaatcgcttgatcatgcccctatttacgcagttctcgggaatttcgaaacctcggcagatcaatctttccggtcgaccttcctcgtcgcaaccgtccaattcggagaccctcctagcgaaagctcgagaggaacgccgagcgagagaacgtaatcgcttggaaataacgagcggtctatgtatccaacggatatggcgaggaagacgagctgcgcaaaaggttcgggacaccttgagagccgacctgcataggcaattagagcaatctagccttagtacagaggattggatcgatgtgaacagggctctcatgctagtcttgtggagtgaccgtgcattgaaaggcgatgacgaggacgcagagctgctcgtgcgctggtgccgaaccgcggtacagatcaactcaagtgagttcagtccgttctgaaagtactgctcgatggctaacccatttgagtagacggtattctcaatgctcttcagccgatcgcttcccagatgagccatgtaacagtgatccatcgtatcttggatcgctccctatctttgttcgccgacaccgagtgagtcatacctccttcagctagatcgagtccggatctgatcgtctacacgtaatcatcacgtttcagggggctaccgaacccaacgatcttgcaatgtctgcaccaaattcttcaagaaggccaatgggactttctgaattcatcaccgagccggacagggaagattaagtcgaccgatggcgaaatgaacgggctagcagaacgacgatggttgatcgagaggcttgtgtccagcaagctaggctgggtgaagcgcctcgtgtctggtatcaagaacgttgtaagtgtacatgtgcatgataaagtacgacttccaactgaccgacaatttcatcagactcctgctcagaaatcaaatcccgctctgccgctccttgtcgagctgctcgtgttaccatcaagatgctatcccgacagtcctattgttcgagacaacatctacccggcctttcttagcgaccttctaccgcgtcctaatcttatgagcagtctacccttgccgagtttgggaactttgatggccggtctacaactctgggacaagttgatcccactagtgatacaagcaaacaaccatcgcgtgctggagtcaggaggcttgaaaactgagatgggcaagaccgattgcatggcgaacttggcaaccattgtagtgcggaccggactcatcagcaagaaagcgtcgcacgatgtggccggttggatgaagctcttgacattcattctagagggggtcgaagacagttggggactttggatcgagcggcaaggcatctgggctgagctcgaagcgggtagcggacgcgacattcatatgactggaccagaagagaagatcgacatggaatcaagtagcgacgaggaggaggatcgcgaactggcggggggcaggaaacgcttgcgcgaagggcagattgtcgctcaaaacaaaagccgagcgcgcggccgcgtcgaccccgctaccacgacgaagcttcttccgttgttctctgctcaacacctcgacatactcgcagcgaaatctgtcggtgatcagggcgcagcagaggcattcaccaaacttgttacgattatgctccgcgccttcaggggcagtccgcggtgggagggcatactggacggcattctgcagagcgagaacgggatccaattgcaacgccaactctggctcgtcgttaggagcagctggacggggtgcaccaaggccacttgggaaactttatattccgcatccaatccgaaaatgcaacatctaccggcattacaactcttctcggtcctatatttacagaatctcctgacgctaccggatgacgaattcttcgaaccggttcgtaagatcggcggccgaagcacactcagcctggacgaaatcggagatctcgcaagtatctggagagatctagcattctggggttatgtagccggactaggatccggcccggaaacgccggtgacaaagcgaaaagaagagctgaggagcttgatgacccaaggcgtcctcgcggtcagcgccaggaagtaagtcactggcgatactacaatctgaatatttgctgaaccgcgccgctcgtcgcagcgcgagacgtcaattcttgcccactggtttctggatcatgatcgacgactctgaaatggggagcttcatcgataccgtttgtcaagaagaacagcaactggagggcaccgctgaggacgaagacgacacgaacgaaaacataccggacgaccagctagccttagtgcctccaccgtggctacgcgccaggcgtctgctgagcaagcgacagatggctaagatcagccctcggctgggattgctcaacaacttgccgatgactcttcccttcgagtcaagagttgagattatgagtgaattcgtcaagtaagccgagcttggggtctgcaatcagccacattctcaagttttacgagtttgtttttgacagcaatgactacaaaaagctggtgcgatatatgagacggcgtcgtttgcgacactccgctactattcgacgtacacatctgagcgaagactcattccgagagtttaacaaactcggtcccgccttgaagggcagtatacagattacttttctagacgagtgagtcgttacgtatttcgcagccgaagtgcatctttccttacggactgaacatctgtcacaaaatgggtagatttggtcaagaggagcagggtattgacggaggaggtctcttcaaagaatggctgatcagtttgtcgaaagaagtattcgataccgatcgtggtctgtggcttgcaacctcccagaacgaactttaccccaatcctcatggctatgcaaaggaggctcatcaactcgaatggtacacttttatcggccggatgttaggcaaagcactgtacgagggtctcctcatgaatgcgtctttcgccgggttcttcctttccaaatggctcggaaggcagagctacctagacgacctggcttcattggactatgatctctacaaaggtctgatcgccttgaaaaactatcccggtgatccggaagacatgtccttgacattcaccttggatcaggaagagtttggtcaaatggtatcaatcgacctaaagaagaacggttccaacatcccggtcaccagggctaatcgtatggagtgtgagtgacgagccgtcgactttgtacgcccagctgctcacaagccttgccctatggacaaatcgacagacatccagctcgtatgcgactataagctgaacaagcagatcgcaccgcagtgcgaagcgttcttccgcggcctgtccgatatcatcgaccctaaatgtaggaatgtgcgatcttacctctcatcaacttgacctgatattgcgcctaattcgcagggctgagaatgtttgatcagcaagaactccaaaccctgataggtggtgcggaaactcccatagatgttgaagacctcaggaaacacacggtcatgcacgataacgatgaccctctgtacgaagtcttctggaaggttgttcgcggtctgactcaggcggaactccgagctctcctgaaattcgtcacctcgacccctaatccacctctgtgagtgactggatcagccagtagcccccgagccttttgttgagaaatgttgttacaggctcggcttcaagcaacttaatccacaatttggcatccgactgaatccagctggtcacgacactacaagactacccactgctggtaggtgcatgactaggctgcatggacgggcttgaactgattcgtacgaattgcttgccattcacagccgcgtgcatgaatttacttaaactgtcggtatccgctcgtgcttctgtaatccctgtctgatctgcggactgaaattgctttgccctttgactgtgtgtgctctatagacctcgttacaaggtgagcgcccggagccggaggcccaggtttggctcggccggtcacaagctaatgcagttcttcgtgttttcgaaggatgaacacaccatgaagacgaagctcttgcaagccatcaacagtaacgccggattttatctctcataaacgacccgaggcctacaaccaagtacttgttattacgtatccaaaagaaatcattgtaaagaacattatcgctgcatttctatacgagcatgagcattgatcatccgagttcgacaaagccggtgcgatgtataagctcttgtgaaagaaagagtgaaatgcggggcaggagaagcggttcttcatagagcaaagtgcagctgcgctgtcaaaatcagaacccaactctaataggtctacagatcacatcagcgagaagttggagatacaataggggacgcgcgccatcatcgacagaaagctctattcaaacttttcctccttgttcactacggcaaagcccatcgactctactcgacctttgcccttggtctccttttccatcaaatccgtcaggagacggaagttctcgggcgggatcctcatgatctatgtagagttagaagaggaatcgagtcagggtcgagatggatttccacgattatgaggaaggaaaggacatacgacttcccactcttccgcgctcatctcgtcttcctcaattcctccttgactgctcagcccacggacctgctctccgagacgctttccgtcctttggtggcatggtaatccgcactttcatctcggctttctggactgggagcggcgaggactgcatgagcgccttgatacactccagagcctgccgtagcatgaaggaagcagagccgttcagtacctgacactgccgaaccaatcaacgcaactctttcaggcggaccgagactaacctgagattttgccggcttgtcggccttgacgttgaagtggatctcgctcatcgccttttcgatcaagctgacactgtacggccgcttcgtcgatggatcgaccactcgctcggcgaccatccccgcgacttctttccagaggttgccgagtttagcttctcgttccttttcgccgacttggagctccccttttgtcaagatttgtttcacaatctcctgcgtatcggtcgtcgcgaacgccttcatgagatccgccgtaggtgcggcctgacccttggagacgttggtgaagacttgagagatttgtaggacctcgtcgacgtctttctccctaggaatatcgaattggttgttttcagaggcaaacccttggatcgacaagatgcgttcgactcacactccagagcggtactcgccgaccttgtttttatagcaggcgatctgatagaaggttcccgacgctcagcacgatctgaactagtgtctcaaagcactcaggactcacctcgaaccgcttcccccctttcttcatcctcacaatactgacatttgtcagtctatcacgacaatgacgtcagaataccgcatcggtcttgaccaaagagttgagacgtacttgatcgacgcggaaggctgattgatgggcatatcgaagggatgtccttaagcgaatagtaggtgaactctattgatgccaagcttagggaatgaacttgacgtcaaacacacttacttgacatgttgattatcatcgatagcatcatcgtgtcctttgtcgccaaaatctcgaaatcacggaatttcccaaacttgtcgtctgttgttgttgtttccacctcgaacgagactgtaaggtcgagacaactcgtccaaagccaaagggtcacccgaacatctacattcgcatggtacagcataggacattcctggatcaaccatacctgctgagagcgcccaccttgagacatctcgctgcatatgtcggcactgatcccgccctccagggtcgccggacggcgtctcttcaaaagccacgtctccaagacttcaaaacaggtccgaggaggagccgtcgaagtacaagcctcgacgtttcggtcgtcgttccggaagatttcgacgacctcttccgtcttcaactcgcgtcaaaccgcatcggcaccggctctatcgactctggatgttcctgctactcttcctgatgctccaagccgaccgctatcattaacggcgcagcggacggcagcgcgactcgcggacacgctcgagctcctggaaggtgaggtcggaggtgatcccgagtggagtagacgtgtggaagcggctcttgaagaactgaaaacgggagtcggaagaaacggccgtctcgcaggtaagcctggtcatcctcctgctatacgtaaagacgagggacctttgcttgagtctgaccttcctatacccatcatctggcatacattagtatatggctctcctgcgtcaggattccgcaccgtcgtgaccacgctattggcggaccctctaacccagacggaaggagctcgccaagccattctcgatcgagcgaatgaagaaataggagagacattcgtcacgaggtcagtcgtcctactctaactcttcctgattccattcatcctgactcttatcggctttgcaaccgtgtgcttgacagctatggagatgttgtgagacgggatgtaaatgggttgatcgttgactctccctggttaagagacgctgcggtcgacgtgcacgaggtgaccagtaagctacgcatggcatgtcgctgtcatatctcaaacaactcgttaaccaaaatctcctcgtgccttgacagctcgcgatacttctcgggctctatcgacgcttctggagagcgacatcgtcctactcgtcctcgatcccgttcgactgctcgatacgcccgagatcaccgccattctcccggacctggtagggaaaccctacgtatactttgtgatcaatggggagattgaatccaacggccttcgggatgtcggcgcaagtgtagatcaagagaaagcccgaagtgtcattcgcaaacggttggaagagcagttacgcgatgtcagatcggcagtcttgggttcggcaggagacgcgtcgacgggaaagatcgtcttcttgtcctcgcacaaagcgctacgatcgatggacgctctgagatcgacgctaggagcggaggctacgtctaccttgcaagggtcatcggagcacgcatttgctaaattcagggaagaatacctggagagtaacctcggagcagtatctgccggtctactcggcgacatcagggctgtacgagaacgagccgacagtcatggccggatttacgaagcgaccaacgagtggatcgccaaatcggcatcgaattacgtcacgaggaacttggtagatgttctagatgagacccgcgagatcgaggctctctgtgcccagcatgcagagcttctcgcccgggcgaggcaggacctcggtcgggatacttatacctctggcgaggctatcaaggaggagatggaccgggccaagaggggcgtcgaagaggtgctccgaaagaggcttgtctggtggaaggtcatgagctggagagtggacatggtcgccgaggaggtcggccgggaagttgaggaacggtgggctgtggagctgacgcagaaggttggtgtggtgtcccccagccaatagctgccaatgcactgacaccatttcccgcttggtttcagctcgcctttgaagccggtcgattgcaagctatccaggaggacttgaacacgagaacatttggcgtcttggctagcttttcgccggagaattcggttcaacgggcaccaaacacagcacatccttatcactcgccactgttcttgaatcgcctgcgccgactggcattcgagaacgatattaccccaggctcgctgctcaatccggtactagcacgacggaatcaactgttgcgattttccgtccccatgttgcaagctcgggcacacaagatgacatggacgacaatctcgttatctttcctcttttcctcggccgcctggaccaccgcggtgcctctcgagttgatcacgcattcgaccggtctcgcggcaggtttactgggctcgctcgccagcatccgttggggagtcggcctgtgggccaaggcgcaaaagaagttttggcaggactggagccgggtggaagagggcctcgaggaggatctgggtggggagcttgagcggctggtaggacaggtggaatgtgtaggcctagcaggcatcaagggcgtcgaagagatggtcgcaaggcgtcaagataaggccgacgaggtcgacgtcgtcctgcaacgactagaaaccgtcgaagcagaagcaggcagaaataaatccaaggtcgagagcgtcacggtctgaaaggcttggaccgatagagttgtacctcactgcggcacgtatataccgatacaatgaaacggtgtcctcggtctgaatacattgagcgggagggtgatcgaccaggcccttgtcccatgacagcagacggcaaggcagaccaaagaatgtcggtccatcacatgtatgaaaaaggaatgtatgtggtgtcatatctctacaccaaggaaagaaagcgcacaacgtaacaagcagcgagagatatcggtctatagcaggatccacccagaactgagagcgagtctacttcttggtaaagaacaattctttgaggatcctagcagtgtcctcgggcgaggtaacggtgtgtccgatggttcgagggtcggagaagatctcgtaatcgttacctcccttgtaagtctatcgatcgatcatgatcagctcggctcgaccaggaatgtctcggcgcgcagcgtagcagcagcagcgcgaatccaactcgccttgtctccaaagaagtgaatctcctcgaatccctcctcggcaatgtggttcaacgaaaaggtcttgtcccatcctacaaccatcccgggccgtcagtaccgctcgcagctcgacccgagagccgagtctcttttccccgaccgcagacagcgatagccaggggacttaccggtggggaagacgtcaaacgagatctgaccgccgatcgagtaggtaaagctgaggtgagcgaattccttcttgaggacctcgacaaacttggctcggcatccgctctgcttgtcccaggcctcgaactcgtttcgctcctgggtgctgcgtgcgaggaaatccgggcggtattgggtgagaaaacgggcggatgagacgagcaggtatcgcttacgaggcgttacgaccgatgggggagacattgatcatcccgtttcggaactcgataaaagttcccctgacaaaggtaccccgagcacgtcgtcagtaggcgcacgatgggggaccgacctcgtcaccgacatacctcttgacgggggtgtcaaggtcggcaatgtagtgcaggatgaacctggccaactttttgtactcttcctcgccgatatgtccgatgaaactctgactggcgagctggacgcccatcttgtaggccgtcaatccgttctcggcgaacccataatcgaacgcgtggatggccttggtgcccgtggcagcgagctgttcctcgatcttgacgaggtcggaaccgccgacaaaggcgatgacgcattctttgcggaggtcctgcaagagctggatcatctcgggcttggcggtctacaagtgaaagcgtatgaacggatcggtacgaggtcaggacatgctcgccggagagaccaagaatcggagccggacgagctcacctgcctagcagccgaaagggtaccatcgacatcgctatagacagccgttcatcgagaggatcagctgttctgtggatcgcatgatctaagcgaagctgtgaagttcgactcgagactgacaacatgcagatggtcttggggtgggtcctgccctcccaagcggcggttccagcggggatcttgtcgtttccaagagacattgttgtgcgtgtatgaacgtgtgtataggcaggcaggtaagatttgggggcagggagaaggacctgtaaacgagcgtgtagcgtgtagattcgagcggctggtttgagatgagccaggtgcggattgtttgcagaatgtgtcgataaaggacgaggtgtgaagtagtcaaagtagcagaacgaagtgcagaggctgtcgctcgagtggggggaggaggatcggtttcttaattcatcttttgcttccttgctagttgcccgacgcgacgacgtggaagctaatttcctaaaagggggacgacgagcgagttgccagagacaagacaggacaacacaggcaggtaggcagaggagagacacacagagcacacaatacgggataaagaatgacgttgaactagtgtcagggagtgagaaaaaaatggcaatctatctagtagtctatcacacaaaacatcatgaaaacaacgaccgtcgagatcgatacacttggacggtcacccgctgtatcgaccacgcgccgtgaaacgtgcggtgagagtacgtggaagtttggtggattcacgaggtggatctctcggggctgtgctactagcattgagacgtggaacgtgtcacacgtacttctcgagcttcgcctttcgccgagccccgaatatcgcctgtggaaaccatcctgcatcgatcaaccccatcgaccgcgcctcgactgccctctcccttctcaacaccgctcactccgacccggccccctctctctctctctctctgcgtgtgctcgagcaggccccactcaggccttttccctgagcgcatagttgttgttggccaacttggcctgcttggccttttccaccttgctctggttctgcttggccacggtgtacaccaacccggcgacgaacccggtcccgaccgcggtgaccgaaccaaagttgactgggtctccgaaaaagatcatgcccgaggcggcgacggggagcttgttgagcgctccgaccatgctgaagaagtggcggggaagccgggacggtggagcggtggttagcccgtgtgaacgtgtttagggtggagagcgcggcgtggcgatcgagactcacgagtaggtggtcgacgaggtcgtacggatgcaccaggcggtcgtgtacgagatgaaaacggcggcggctccggaaaagcacatggcgaacaacaagaacgaacgaccctcgggagggctattcccaccggcaaagtagcgaaacagagtttttggtttcggtggtgagcgggacgcgcaaaagtccccgtcgcgatcggtactcacaagttcaagctcaggttctccgcgccccaatcctcgacgacgacggaagcgatgatgagcacggggatgcacaacaagttgttgtaaaacatcgaatcccagtccttgaacccggtgaccttgatcctctttcgcatggccaagacgtaggcggccgagaacaagcagttcatgcccatccacaagtacccgacgttgaggttggcgaggatcgatcctgccgaaccgacgaggggcatgtcggcaccggtgatcgggtcgatcgtggccccgccgtccttggcgatcatggcgttgtgaatgtcggaccaggcagcgatgatcgaggaaccgaccatgaggaagaacgagacgagcgagagcccagtgacgtgcccgccgaaccagatgacttcaccgtaggcgatcaggatgatggtcaagttcttaaagatcgtgtagacggggatcgagaggaattgctgcgaggatcatccgggccgcggcgagtcgtgcatcgtcagcctcggagaaacttttcgcgacgacgtcgtcgatgacgggtcatggcatgcaggacgtgcgactcaccagcgacttgctacccgtgtaaatcaccgagaccaacaacgccgagatggggaaccaagccttggcatccttcatgtcgaaatccctaaaagtgatgatgcccatcttcttgacgatgaagacgcttccacagcagacgaccgactggatcgtcaagaggagaaaggtcatggaaaagtggtgtcccgagacgacaaactgtgggaccaggttcgagagggcgagtgcgtgttatgtcagcgataggtttcccccggcgatacgaggacgaacgagagagacgcgggtactgaccttgttgacgacggtcatcatgatactggctccacagtaggccaagatggggaggactgcttggggaggagccgtgccggtcgtcgacggggacgcaggttggccgttcatggtgttccaggttcagcggtgggacggtgtgatgatggttcgggcgaaagggtgggcgacggggatcgacagatggaggagacaagggctgaattagtcaagtcgttctctcgagtgtgatggacctaggcagagtcccaaattgtggaggtgtgggagtgtagtaacagcacagcagactgtgcagttatggtcaatgcagaggagatgggtggggggtggatggtgtgtgctacgcgttttgccgtctcgcgagagatccgagctagcgaaatctggcgggacacacgcgggaaaagggcaaaggacggccgaggtgggtgatatttctggaaacttgacgatcgggggatgatggacaagcgatctttcaagctggatcgtactcgctctggtaatgatgctgctgctgatattctcactggtcggtatttggctgtcgacattttgtataactcgttcgacttcgtctttgcccgccgtctgttgattcccgagtctacccaacactcttcttgcctttcgcaacgagcaaacgaaacgcgtccggatcgccctctcccacactcacaagaattggtaggcgctgcctgtgccttctgttccccgttcatcaacccggtcgtgacgtcctctccacgatgactgctgatcttggcgtcggcagcgtattgttgcaagttgacgaccgatccgcggggggaagagccgaggcctggtgagcccggtcgggaggcggggcgggacatgatggggtggacgagttgggtcggggtaggttagaggaagagaaggaggaggtagagaggattcgaggtaggtggatgggtgggacaatgtcgagaagagggaaaaggtcgaggttgtgaactgtgtgttttcgccaacctacaatacttgcggtcgagataattatcttcccagctacgactctgtatcgtggtgctagctgatccaattttgcttccacaagacacaaaccctccttctcctccccaccccaagctagccctaccgtgatcctccgaacgcggcagaatccaacacaggaggggaacagacggctcagaccgaaagcaaaaaccatcaggagagagggcggaaaaaaaggggaaaagggcgcgcgcggccacgcgtgtttgccatgttcatcctccctcgccgcctgcttgtcgtgcctgttcactgacaaaccgactagcgactagcgatctagtgatctagcagtagagtgtacgaggtttccggatcggaacaggaggctattccttcctttcctctcgcgcctcgggccctggcctgcttctctgatcgatgcccccatcattatttcccggtcatcgctttctcttgtctcttagccacgcgactcgggctcgagccggaaaggcaggccaacgaccaggggaagggggacagatcagatagagacaagcgtttaaagttggatctcgacaaccttatcgtcgtcagacggtcaaagccttttttctctttattttagctctcgcttgacttgtctctcgctctgattttgctctcttgcatggcttgtatgttgcatgttgggacagcgaagatataacgaccggttcgagacgtaccgctgatggcaacggcggcaaccgggggacggaccgggaccgggctgtaattcattaccctaccctcccacatctgtccgccccgtccgtccggatccaatccgtacccattcgaccccatcatcatgatcagtcattcatggtcatccaacggccgctaagcacagtcaagccagtccgtcagtcctatagtcattcaatccgctgtatatctgtacgaacagagtcagccgatgagacttgaagggtaatcgagcgaacgtgacagagattatccggcttaggtcagcgtatttcaaaggactcgaggggggtcgtattacatccatcggatcaagagagagaaagtgacgtccgtcgagatcatcgactcatcggatcattcgtcctccacagcctgggtcatgcttgtgaggctggaagttttacacttacctggccctggaactagatcgtagtatgtcgagaccccgatcgaacgtatttctgtattatcgctcgcaagatctctaggcgctggcacccgatacaataccccatggatctgaatgcatcctggaaagtgcatcggttgagcccaaatccccagcgtgaaacagcagaggggcaagaggcagctgccgaatctcttccctcgttcaaagatagcccagacgcgctctgtggagggagacgacccggggaccttttcgagctacgaacagagagaagaaccactgcgacgcaacgacgtttcatcgtttcatgttttgggtagcggcaagcggcaaggggggggggggggggggggggctacgcagagcattctttggaatccaaccgacttaccttcctcacctccgtagtaggcccggctgttccctctcgggtgggggtctcctccagacgcatactctgcagccgctgcaggaggttggtctgaggcatcttgccctaagattgggcggtgcaacggcattagtcatacacattgctatcgatctggtgccacagcggactcactcggggaagcttggcaagaccttccttggacgccatgatgtcgccagtccgaggggcggtcggagcagcaggggcgacctttcgacgcgtgatgggggtggcgacgaccgacttgaccgacgattcacctaccgtgacccgggaatcgacgaaagtcgaagggcccgagccacaaccggcatcgacaaaggtcgaagaaccggcagtaggggaacagacgatttcaccggaagccgtcatttccaaacaagcgccgacctataggaaggcgcgggcgtgtcagtggtcacgaggcggtgcatgctccggcagacggtccacttacctgctgcttggcgtaagcctcggacttgacctgaacgaccgccacagacgcagtgggtgactcgactacggtcgcgaaacccggcacaacgtccgcctgagataggggtcaaacgcgttgcgatgatcagtgtcgagctgagagggaaaatcgcggtgaagacgacttacgcaaatgtccccagtagcggcggtccggcagtttgccacctccggtccgatgggcgaagcgaagaccccgggagaggccttgaagttgcgaagaggcaagtcggcccgaatcgatcagcgacgcgtcaaagtcgtgatgggatgatgggatcgaaggacttacgacagtgacggccgaggattcgtgctcggtctcctccttgacagagacgcgagcggtgaccccgacgacggcgttggcgggagcggtggcgacggcgacaacgggggtggtcttcctcagcccacgaccgatggcgaccccgatgaggagccagaccagggacgagagcgaggggaggaagaccgagaggcccttcgatgacttaccgagaggcatgcccgtcgaaggacgagcgatacaaatcggcaaggtcgagttaccggttaccgataccgaatcgggctgagggaaacgagggcaaatcgaatccaggagcgcgacggggacgaggacggtaggcaatacaacggtgggcaaaacagcgacggaggcaaaggggaacaagctcgcgaccgtggcaggaggggtcaatatggcaggagccaagctcgcgaccaagttcgggggagtgaaaatgttgcccatcgtgaagacggacacatagacaatacctacccatttggcgatgcagtaggcgaggaggatggggagcatgttgttgttgttggtggtggtggtgtcggtagtggtggtggtggaagggggtgcaagatgggtcaagaagaggtttgatgaagaaaagagagtagtaggatgagttgatgaagaggacgtctggaccaaaacggcgggaatttatactattcggggggtcgagggtataggggaatctgggatctcgcccccattgaacttggatctctcgctctatcgacctcggagaatggttgatgatgatggtggatcagggagacgacggatacaaaacggcatcacgaccacaggatatcaaagtcgagacccatcaactcttctagcgcccacaatagaggaagacatagtttaggcttttcgtcgaagcgagtcggggcttttaatatccccggagaacaagaaacggcgaggcaggcacagtgatcagggaacccaagagtcgaggagcggacgcagggcgacggacccgacgggatattccggatctctgaacacctgatcgcagatttggtcacccgaaggtggagcgctcaggcatgcaggcataatatggaggagggagcgagccaagagaacaacaaaccaagcaacgacgaccggcgaatggtcttgcagccatcagccccataggatgggctgtgccgccccccggtacctcgacagctttgcacctgacaaagatagaaggagaaacgatcacccgaggcgacaaggaaccgagaactcaaaagatcaaaggccgggaaccgaacagtcgtctggtaatcatctcttccgcagtaaacgaacgctagccagtcagggaggagcgctccgcgatcagcagccagtagaccgtagacagtagctcagtagacagcagcctggggctgtacagagcgcacagagcagcatcaccagcggatccacggatactacaagctagaaagatccaagagatcaagagagcgctgaagcctacgtttccgtcggcccacaaatatgcagctgcagcaaaactggtgagtttacgactggcgcgactggtcgagttccggaatgtagagtgctttcgaaccctcagacatgggacgttcaattctgtaccttggccagacttgctatgctgagccagagcccgatcgttctatattgtacaatgttcgttcgtaattcgttacaaagagaaggccaaatcagatattactaccgtaccatgctttatatgcaatgatcatacaccacgccattccgctcgagaccgttgacatcggtcagtccgccatatacccctatctccgtacgcgtccaagtcctcgatctccgtcacgaacttttcagacccgggtcgagcctagatatcggacaggttcccacaacgcgtttccaagtagatgtaacacacgttgcagacgggcgtaagctcgccatccctgaatcgtttgaccgaatcgaccacgtcctgtaacgcgtatcgatcagtcctctacccctagcgacgtcatgtgaatcggcacggatcaaactgaatgactcactcggagatcctgtcgaccctgtcgtcgatccagattcttcttcttggccggcgtgctccccttgtccgaacttcctcccttttccatcgcagccttttccctgacctcgtcattcatgtcggaaaggtagactccagcggcctggacactggcgaccatcaacgtcgtctccaacgcttgttgtcgaatcaaccggagtcggtcttccgagaccgcgggccagctggccgtaaatgacggcatgtctgggcgtggaccattcagctcggctttgggactcgaatccaggtcgatgatgcagctggcgaattcgaccaggatgcgagaggccgtcatgtgggtcgaaacctgtagcgatgagtgtcgagtcatgtcagcagatcgggtccgaaactaggtaaccattcccatagagactcaccgagggcagtcgatgatgatggttgacgaagccgctcgagttcctgctaaaagcggacgttatggacaaccactccgacaatagggtcacagccgaacaagaagtaacgagcagagcttgcacgacgcggtcctcggccgcatcgatggcgctcgcgatcgttctatccttgccgtcggactcttccatctcgaacccgaatgtctgtaccaccttcatgcggataaccgtcggtcgggtgagcgcgttggtggcggaaaggagataggccaagacggtcttgctgtaacgttgcagcagatgtttcgacagcgcgaggtcgacctcgacgtccctggcgatgtgcaaaaggatctcaaggatcgagtggatctcggccaattgaacgagcaacgactcgccctccagctgccaagccagtgcagacgcgatccgtctgtgcatactgtcaacgaacggtaagatttcggtccccacgtattccgcagtgtagggaagagtctgcaataggcttcgagctaccgaaagcatcgttgtccacacagtttgtaagtcggcgtctgcaacaagcagttctgggtgtactgagaggttttgtagcagcgatgttccggcatacacgcgcagaataccctgaacagacagcttctcagcgccagagggtacttgagcgatggtccaatgtagtcgtgtgacgcttttgagtacgctaggtgtggccagagtcggtcgagaaatgatctcgcaacttcggaggataagtccggcctgctcgaggtgaacgaggcagagaggctctgctgagcgatgtcccattaatccgccgatcgcagatacgacgagatccaggtcttcgacggccgatgtcgtcggttcagattgcactgtagtgaagacgtccgtaaggagttgcgaaacgatgggaacgacggctcgcaaaaaggcgtccaattccgaggcgatctcgtccaatttcccgagacggattgactcgcgagtatatcgaaggtacaaaatcagggtgttgatcaatggccgatagtaggccggcatcgatggttcctcgaaaggtagtgtcaaagggaaactgctcgagtcgaatatggccgcgaatggtcggagcgtcgatttgagccattgtgtgtcggctgtccagtccccgacccaagtggcctctagaagagtctgcagcaattgataccgttgattctgcaggccgataacgaaggtaccgacccgggcttcctcggatataggtccaacgactgctgcgaaagaagctgctgtagtcgaggcgacgtcatcttggtgggcaaaatcgatcgtcgcctgcgccaacgtcatcgcggcctgggcaacctcttcgtccgcaatgtttgcagactcgttgatgctgatcagctggaagcaggtcaacaacgctcgacgctctgcactgggtagatcaaagacgccccggagaacacccatatctgcggcgcacgtaaggtaagcagatgagattaaagaaacccaccagaatctccgactgaccgaatgtaaactcgtctccaaagaggcgcagatgggcgggagctggattttgcagcatctcgaagtgggctaccggcaataccgtctggatcagaccggcctgctctgcgcgaagatcgggatcgaaagcattggcggtcgcgtctgccagtagtcgagccgtttgattgcctgctttcaacaaagcgagcgcagtcttgacgtctgccctgctggcggtatcctcgtcacgactagaggccgagttgaccaagaccgtgtggagtagccgcatcgcggatgccttggcacttcggaggtagcaccggttgacatagccgtcgacgagattgctctcgtcgtcatcacggtttttggcgttcatcgcttctcgatcgacggatgcgccgccaggctggatctctagaacaaaggtggagaccgctttccacaaagcgccgtcgctcgagatttccaggctgtcgacaaggtcggcgtgatgatcgtataaatcctgaatcaccccgatggatcgagatagcgaccgagcatccatcttggcgatcttttcccaatacgtgactgtcctgacagcggcggtcaaagccgtggacctcgcctcctgatctttgtgcagacagaatctcgcaagagcaggctgagcctcggccatcaggcgaagcacctgccaagcaccatcctgcacttctgctgatcgtgcaccccgggcgagcaaatcgataaacctgtcgcttgtttcctgaggcgacttgaggcaggccatcaagctgaagggagattccgcattgctagcctggaccatgagggtttgaaggaagcgaagcgcggcaatggcggtttggtcctcgaggtaaggcgaggtggcaatatcaaataccgcttcgatgacgtgcagggtgtcggtctcgctccgtccatccgccgtgcgcgacacgatagagagaatgctcaggtcggcgtgggtgcccatggcaaagcaggcgaccgtgacgtggtaagccaaatcgagacctgcgagcaaggctctttcgagcggtgctcgatcgacctggtggacaggacttcccgatgcaccgtagaggggagtcgtgataacgtcgagtagtggtacgagatcgtagtcggatgacgtacgtacgagcttctcgcatacgacattattgagagcattgagcgggagctgagcgcccggtcgggtaaactgagcggtgaatgagggatttcgcagtaccgagctgtagagtttggtgagcgcggtagcgacctgcgctttttgcctcgtactagtgtaacgccagcccctgtagcgcgtccataccgtctggtgcaggaattgaatcgtgctcgccatcgtttgggaccgattgtgtacggtttcggggtcgatctggaactggccgagctggacgtgctctgctagcttgacgatcaagttgagggcgttgatggtcgatgtgtactcgccggcctggacgtcccggtcgatgatgatccagagggtaagaacgtcttgccgagtaaaagtgaagaatccgctggaacgaagttcggaccaaattcgttggggaaacttgttgaggaggattgaaatgatagatgtggccgatgcgatagcctttcgccaactctctccctgacgtacgacgacggtctgatcgagcaaggcgaacgagatggaaagcaggtcgctggcggatgagccgttgttcgctcgagcgaccgaggcggagaggtcttgcacgtcgacgagctgttctgccaagctagggtcgaccgacaagagatcccttacgtaggccaagcccgcagacaagacggtcgtgaggtccgatgtatcgacgaaccggctccactcttgcgccttgcgccgtccagcttcgtcgcgggccaatgcggcttgcatgagcgagaccaagatcttccagcccgatagatcgactgcccacttgaccaccatcgtgtcctcgcctgatcgactgacgagcacgccctgagtctttgccgggatgacctggccgcagggcaacgagagatccttttcgagcgtgatgatgaccgtctgtccacgtaattctcgggtgaaaccgtcatgggcatccgaatctttgaacatcaaggtcacttgatccaaggtggagaaaaagtcgaacgactgcttgaccgtctctctgggcgaaacgtccaacagctcttcggcatccgtctctacgtcgtcgttgatctcgtccgtcctgacgctccccgctcccgagagtccggtgaggagttcgaccagtggcacggggaacaatgggaatgctgcgcattcgagaacgtcccgcctaccatcgctcgaggcgttgcgccaaaagtctccacaggccgagatgacggcgtcccgtggaccctggccgtaaagcgaggtgaaaacggcggcgagcttgtcgaattgctgaacgtgaggaggtcggacgatcgtacacagggcgaccatcaagcctggtcgtagcgcagagtgtatcgcgatcagctcgagccccttcgttcggaccttctcgacgttgccaacgaccgaatcgactcacagttcatggtgtctttgtatcctaccacgtaatcatccccgacgtcgcccttgtcgtccttccagaatcctttcccattcaataaccccgtccacttgtcaaacacctgcatctcgtcgcccagggctatactcgtcacggtctggtaaacgggtacgaactctccctcgctggacccttgaggcaagacgtccgggtgtagcctggacaggatgaacgaccaggcgaggaggacgagcgggaacggagacctcctcgtcgtctcgagggacgcagtgcccaaggtcgtatggatcatgtcgacggcttctttactctggacgagcgatttcgacgcgccttgttccgctgggtattcgtccaggggtacgacggtgcctctcgagatcccggacaagcccaacgtctcgagcgcgatcaaccccaagagggtctcgatcttgtccaaccacctgcccgcttcattgacgtcgagactctcgatcagacgggcgttggcttgttgagcgccgaaagtcgatccaaagatcccttggatgagcccgacggccatctcggcgtccaacaatgacgtcgcttggtcctcctcgccttgctccgtcccggatgccgcaccgggtaaccaatagacgagctggaagagggattccaagaggctcgtctggaccttcaagtggtggacgatccaactcttggccatgctcgccgtattgcccggtccaccgccgatgggtttgtactggaccgtatgatgtgccgctcgggcgaacgaggagaagatgacgtggatcaaggtcgtctgcggagcgtgatgccgagcgagttggaacagtgctcgttcgcataagaagtctagacgcatcgccttgaccccgatgggcaagggcgagtcttccgaatccgagcctgatgagcccggtaagagggaggcttccatgggatcatggttctgagccccggcagcgcggacgatgatcgtcgtcaacagccggacgagagcgagggattcggcttgaaaataccgggtgagctgggtcaaggtggattcgtccggagtcgaagaggaaacggttggtcggttcgcggtcgatctcgtcaacaccgtcgtcgtcgaagacgccaatcgacgagggatgatactgctacgcgtctgacccgggttactttcgtttcgattccgactggatgcaccgtgatgatgaccgcgttcgtcgcgttgatatcgtttgacgaggacgagcgcttcgacctcgtctatagctaaccggtcgctgagctcgagcacgagaggtacgtcatcttgctctactaccacctcgcattctttgccagcatttgcgctcggtcctgatgctgacggcgaggatgaggaggtccccgggatctgaacatgttctccgaccttgatcttggtgcgtgaggtctgagatggcccggcgaacggtgtggacgggtccttgaggtggtcaatgtgtgaagagaggagggattcgagcgttcgcggggaaaggtctcgacggtatttaggatcctggatcgatttttgtagctcctggatcgatctgttcaggtataggaggttgagagccgagcatcgatgggtggtcagatatgggttgcctgatgttgtgatgcaagtggattctcggaatgactcacgttagccaaacgtcctggctcatcggctggagcgacatggcgacctggagctagatctgatccgggtctaaagacgggtccagtatgtagaaagtgacgaggttgtctgtgtgttgggcatgaatggtgaagactgtctaaatcgacacaacaacatgcaaggatgtatgtgctctactcaccttgatgatcgcttggttactttgacagttctgtgccaattgaaagcgcaaaacgtcattcggaaccatatttgattccgattttacgttatttccagcgaatattacgtcaacaatctcgtcatcacggttgcgcttatctttgatggtctaccaattaatttctgaacgaccgagcacacacacactttgccgcctcgaatcaaccaacatgcaacaagaaaggttcaacatcgagtgcatcgtgttgcgaccccccccagtgttgatatccctccctctctctctctctctctcaagttcaggattcaacgcctcgaacccggactgtaacctaaacttgaccatagcaatctaccggcaagatgggtaaacacaacaagaagaccggacgtgagcgtctggacaagtactaccagatggccaagagccagggttaccgtgctcgttcgtccttgtgagtttcgacttcccacacgatcctatgtatcgtcgccgcgtgcactctctgaaccgtttcgccgccctgcagcaagctggtgcatttgaaccgaaagtacgacctcttggccaaatcccgcgtggtcatcgatctgtgtgccgctcccggaggttggctccaggtcgctcaaaagtactgccctcaacaatccctcatcgtcggtgtcgatctcgatgccatccgaccgatcccgggtgtccatacgtttgtcggcgacatcacgacccaggcgtgcaggacctcgctgaagggctacctcaagcatttccaagccgacctcgtcctccacgacggagcacccaacgtcggaaccgcgtggattcaggacgcctttacgcagagcgagttgacgctccagtctctcaagctcgccaccgagtttctgaaaaagggaggagcctttgtcaccaaggtctttcgaagtggggattacaactcgttgatgtgggtctttaaccaactgttcgccaaggtcgaagccaccaaacctccttcctcccgaaacgtctctgccgagatctttgtcgtctgtcaagacttccgagcgcccaagtacatcgaccccaagttcctcgatcccaagcacgtcttcaaggaactcgccaactcgaacgctcccttgcccctgagcatcaccctcgaccctagctcgacccaggcctcgtcctcgtccaacttgaaggcgacgacgaacgggttgaccaactcgggtgccagtctcgcgttgaacgggacgaccaacatctttgccccggaaaagaaacgacgagcccgagagggttacgccgagggggattacaccctgtaccggaccttgcccgtccggtcgctcgtacacgccaacggactcgaagccgtcaccgtgctctcctcttgcaacgcgctcgaatggtctcccaagggcgaacccatgggtgaagaggagaaagtctggtacgagagtcgacacaccgacgacgatatcaaggagagcatgcgcgacttgcgcgtcctcggtaaaggagagttccgaaggttgatgaagtggcgtctggccatccgcttacaagtcgggttggatgtcaagaacaaggacgtcgaagaggataccgagggcaaggtgaccatcgaggaacccgtcgatgaagagacccaggtgacggaagagatgaaacggttgcacgaggaaaactcgatcaaggccaaacgactcaagaagcgtcaaaacgagaaaaaggcgaggacgatccagaggttgcaattgggcatgaccgcaccggaagacatggtactcgaggacgacgccgcgttgaggggagaggacatgtttgacctgggtacgggggagaacgaggtcaagcgacgaggggtcaagggcaaggggctcgcggatctcgtcaaggataccgacgggatggatgacgaccaggacggacaggagagcgaggaggacgaggacgaggacgagtacctgtcgagcgacgacgaacgagaggccaagacggcttacctcgagggcgaattggacggcctgtacgacgcttacaaggagaggatgaacgaacgggacgccaagtggaaggtcaagcaggcgcgtctccaagatcggaaccgtgacgcctggcatgggatccgggatgaagacgaggatggcgagaatgacgggatcgtcaaggtgcagggacatggtgccggacaggatcgcgtcgagggggtcgatgacgagggcgaagagtccgaggagggcggttgggatctcgtcgcttcccacaaggccaagatcggggaagaagtcgattccgatgacgattccgattcggaacacagcggagatgaggagggtgcgcctagggtcaaaaaggtcaggttggccctgcccggtcatgccacctcggcagccgccgtcagagccatgcagatggccaacaagagcaagcaaaacttggtcaccaacctcggcgccgacgtggaaaaggccgaaatgagccggcaggcgcaggtctggtttgatcagtccatcttcaaggacgtcggagatctcgccgatctggatgcgggtgatgaagagcaggaagaagagagcgacgacgagacggaagagagcgacgaggacagcgatattgacatggccgaagctgatgtgagtcgggatagccagagactctaggttggccgcgagctgaactttatcttccgctggatttccagatcgacggttccgaacacggcgaagacgactttgaggtcgtgcccgtgcaagaagacgacggtatgcagtgggacattgaagacgaggatcaggatgagatcaagcgacaaaagattcagagtaagcgagatgttcaggcggccattattatcctcagcatctcatttacattctccgtcggcttgcagagaagggtcttttgaccgctgaagcagtcaccttggccaccgccattgtcaaccgaaaactcaccgccgatcagatgatcgacgacgggttcaacaagcacaactttaaccacaaggatggtctgcccacttggttcttggacgacgagggcaagtactacaagcccaacctgcccgtcaccaaagaagccatccaggcgcttcgagcgaaacagcgagccttggacgctcgacccatcaaaaaggtcgccgaggccaaagcgaggaagaagatgaaggcgtcgatgcgcatggagaaggccaagagaaagatggacggtctgacggacgcgcccgacatgaacgagcgagacaaggctactcagatgatgaagctgttgggtaaggccgcgggcaagcccaagaagaaggaggtcgccgttgtcgtcgccaagggtgtcaaccgaggagtcaagggtcgacccaagggtgtcaagggtcgttacaagattgtggacccgagaatgcgtaagttggctcgcaatcctgtcgccgttcttcagtcagctgacgcagaattctgcttctctctcgacaacaggcaaggaagtcagggcactcaagagaatcgccaaacgggacaagaagcgcaggcattagagagggcatctggcgttttccgaacatggttccatgggtgtttctcatcacgctttcttgtacagattagagggtgtagcgagtattgttgtcttattagccgtatcatatcattccgtgacaaggcaggccggcggtcgtgccagtgtcgaattcccgtgctttgacgatgaacaatcgcacggttccgcagtcccggattacaagagggactgaaggaggtgccatccaatcagaacaaggtatcctgtaccgagtgcgaggcttgggatggccgtcgtcgtacgcatgtctgtattgggtttagcctccaggactggcgcactgaagtaacgacgtacacccccgataccgtccgtcttcgaatatcgacaaccgaaaacgatgtcgagtcggtctcgctcggcctgcgaagtcatccgcttaaaaaccgattcccaagcttctatactagctggtccgacaccgtcacccgctggtacgaccgtccgattgatctgatcaaatggataatagtccaaacgacaccagtaccattgtgcatagtcggcagtcgagttgcccgcgcttgtggcattggtcgtggtcaagaagtctctatcaccggatggcgcatagatgagagatccgttgacgatcggattggcgcaaatagagcccgtgaggtacggctccgaggttatgcagacaaccgtctcgtttctgacttggcggtcgggttcgccgggaaggaaggggtagcgccacgcgatgtcttccgtgaactgctcggtgtacacggtaccagttgcgtttcgtggaggcataatgacgtttgttagtgtgttgacttcggtcagacatggactcactcgccgcgtgtagccccaatcaagccgggaagacagccacatatatacccgttcacaagaatgcttgacaacgagctgatcagatcatcaggtgaccagctcaagcagtcgctccaaaatgcccagactttggtgagtattccgcgctaaagactcgcgctagcgcctttgatcgtcatatcggtaagaaccgtgggcatatttggctatagcacaagggaccggatctctacacgtacagctacagcagaggagccagagattgctacactgctgcgacttggatgactttcccaaggtggcccctgtccgaatcgacacgggttcatcgtgggaaagcgccgaattagttggagccgtgcttcccacgaacgatacagtctcgacgccagaactgcgaatttcggagtcaggtgcgggctgcgtactgaagcggcgctctcgtataccttcctattcgaatttatggcacggtgacgaagcataagacctagggccggttttgcaagacattcgcctctatccgactcaccttgatagctgtcctcttcacgtctgtccgctcttcaatcactttcaccgcttctaccaacgcctttgcaggcgcccctcaaaatgtaagatcgtgagagagagattccatggtgatgtattcggtgtatcgtaaagcaagatgcgcggttctacatggaccgccatggaggtctggggcttgagaaagtgcttcgccactcgtgtcagtgacccacactttcttatagctacgttcggtccaagttttgaaaggaacgtcagtcacatgaccttctcctcgtatcgcatccaacgcagtcgtgttagcatttgtattgtgatgcacgtgagcctcgccgaggtgcaaaacagcagacagatcgattctttccgttcaccaaattgctcgaaccgtaaattgagaattttcctcgccccgatacgcctttgatagacattgttatcagctgataaacatcgcttaggcctcgactgaggaccttcctagaccaggtacacctttgatagacaactgttgatcagccgacctcgaatcgtgcaccaggattccttttgcgcccaatgatgtacagctatggcgaccgaccacggtcgtgaattccgcgtcaaagcaaactatatgacttgagatatgacctacatttatcacgagctgagcgcaggtttgcaccaattgaatggtccgcgaggtctcctggtccctccgtcgagaggatcgacccacggactggtttggctttgagtattgtttctctgcggtgaaacggcgtctgatgagatcccctggggttaattaccgatcgcggttcaatgtagccgtacagaccgtcttgtcccactagtgtcttagccggcattagtggctgcgacaaattcgaggccgagaaattccttcaaacaagagctcagggcatgtgcgaaaggggcatgttctgattcagcagggacgccacagccagcgagctggtgagtgagaatgctaagttattggctgtaccggcttgaactcccaaaccgtcctcaccccaggattatcagcggaaccttttatcaaaagatagtagcacaggccaaacgttagtacttgagctggagttgcaggaagccggcctcacttcgggagtccgtgcgaaaggcgggctcgtccaggcaccaaattcgagacatctattatcgtccaaaaggtcgttacgacacgcagatcacatataagtatacagtgtttccgccctccgaccacttatcagtcgttatcgtttactatatccaccccagttttcaaatccaaaggtcgagcatatcttctccgaatggtcgtctcctgcattctcccaaaatcccctatattgcggcttccccccgatctcgattcatcgcaagcgagacgagcatacatccgttcgcctgcgctcgatctctcaaacccccttgcccctttgccgagggctcaaacgacgagggccaagaacgcacatacggccgccccgatgtccgtccatatcctcacccgattaacgtccaaccacctcttcaacgccctcttgacgtcatcctcgtgcctcgtcctctcccccttgtccgagcccgaagcgctgggtttcgacgccgagaggacgtgtgggaggataaagaggccaaaggggcataaatggaggatcccgaatatcgaggtgaggaggtagagggatcgacggagtgggaggttggatgatgaggatgaggagaacgagtggagggattgaagagggtggagagcaccgtttgatgacgagtacgaggcggtcgtcgttgtagtcgtcgtctcgagcgcggacctgaaccaacgggttcccatcctatccgtccgatccgggtccaaggcgaggtagaggtacccgctcgacccgatgctcaaaaagatgttggccaagaacgtccacgcgccattcgtatacgctctcctgaaaatctcgctcaacgtcctgcccacgatcggactctcgagtttgggtaggggttcgaggtgacagatccattcggtcgagatggcgaggaccgaggtggagaacgtcaaggggaggagcgggagggcgcgcgaggcgaggatgggcaaggcggggagggattgacggatgtcgaagaatgacggaagggcgtcgagtggaaagaccatcagaggcaaagaggtccaggtcgagatgaggtcgaaatcggctgttgttgttcgtcaaggggttcgtccgaggtcgtctgatttgagctttaatccggttctatatcctctattacgatctacggcgcccccgaattgaacgagtccatgaaaggagaaccccgtcgttaccacaaggcgaatacgtgtatgatcacttgccccttagtccgatcgggagggctcgaggtggtttccctgacgttccccttgtctattttccctttgaggacgttgttgtgtcgcttggtgaacttgtgggaatccaagatcgacaatcgaacacgaattacgtcatcactcatacacacaacacgcaatagccgggtcagtagcgtcgatatcgacgaccggaatgacgtgagcaacatgatcgacatgggacatgggcgacagctctcgacgacgacgacgacgacgacgacgacgacgacgacgacgacgacgacgacgatcaatacagagggaattcaggatccaccttgtcactccatgccctcactccaccaacgacgtccttgacctcgcacccgcgtccctccccttgctccccgctcgtgttcaaggcggctcgtagagcccgggccgagatcaagctgtcgttccctcgtcgacagatcaagtagacctcggagggcaagtcgggcgtcgactgtccgatagaccgagctcggagctgtccgatcggatccgtgagaaaggtcgtcatcggtatatcttgatcaaacgttttcaagggggtcggttcggatcagtgcgtgattggcggccagatgtatgagaacgacagggtcccggtaagactcactgatagatcccggtagcgcacataatccatattcgagctcttccctgacgtcgacgaggaccttgttccccgtccccgcctcgggcggaacatcatccgcgggcttgtcgagggacgtgacgtaccctcccggtatccgaccctcaaaaaacccatccttgagatcacgcaccgagaccctctgaatctcaaccccgactgcgctatcatccttcctctcagcgttactcttccgatcgtccgagccagagtcgaccccgcaaaattcgtcgtaatccaccgcgtccagatcgtccgtgatatccttaccaggcccacacgcgcggcatttaggggacggtcctctcacccggatggaacgggacggggtcgacgtcgagccgggttccgaagtcagcgcgggggacatgctgatcaggttcaatttcggttgagggtctatcccacacgcgagcggggcgacgggatggtcgttcgtaatcgtaatcagacgtgtgacgttcaaaacggcgcgccagactcaccatccaccccgaggacgaccttgatagcctcggccgccatctgtacgccgacgacgccgacgatcggtccaaagacgccttcctcttcacacgtcccggcctggctgttgctccggggcaaaggctggggaaagagacatcgataacaaggtcgcctcgtccgggttcctgcaacaggagtctccccatcggctcctggtgacgatgtcaatatcgacgccgatgtcgacgcgaggtccacgggcaatccagcctgatgataccctccgaggacgcaccactgtccagcccactcgatagccgccccgctaacgagcggtacgtctaaccgtacgcaagcgtcgttgacgaggtacctcgtctgaggacggtccgtacagtccaagacgaggttgtaaggtctcaaaagaccgagggcggtcgatgggaggatgggcacggtatacgagtcgatggtgacgtgggggttcaggctgggggtggcggtccgtcgtcaagacggttttgaaagtcgatcatgtcgatgacaatgaaaatgacgatgagcgaacccggacgacgattcagtagcgctccgacgactcaccccatcaacgcttctttagccgactcggccttgaacgatccgaccctggccgtggtatgcaagacctgcctgtgcaggttggacgcttccacttcgtcgaaatcgaatatccctatcgtacctgttcctccaaggcggagcaaggtatagccgacgatttcggtcggtggggggttaatatagcgaggcttggtcagtctcgggttgatatgacgatgacgatgccgatggcgaggaggactgaaggacggacctacaccggctcctgcgaggtattgtaacgccggacaacctagtccaccagctccgatcacggcgaccttggcgttcttcaacttgagttgacctttggtgtgtacgtacgagcggtgaggatgatcagttctttgacgacgtgggggggtaagacgagatgacgggggtcgtcgggggctgaggctcgacttgcctgggagaccgaaaccgcggaggatcatctgtcggccgtaccgacggtactcttccagcgtgagcgaggtgtgttgttgttgctgcgtcatcgtctcggtacagtacggagattcgctactcggagcagatggttgatccgagtgaggtcacagcttttgtctagtaaagtacgagttgcgagttgttcaaagagtagggtgtgtacaaaggtgcttcgaccttgttcttgcgacctcatcggtcatcgacttttgaatttagcttccgagaatttccggaagtttaactacttgggtcaaaggtaggtaggtaggtagcaaggtaacatagcatagcatagcataacctgcggaatatattgacgttattgattcatggtcatctcgagatcactggcttggccatcacaagatctatcgagttgcgaattgcgagttgcgagttgcaagttggggagactgagcaggagaggcgatgatgtttaacatgtcaccgctgtgcctctgcgtgcatttgtcattcctgttgactgttgtgtcgttccgcgaaagagtttgtgccggccgaagcatcagcagcgacgactggcaaagctgatcaacactctgattcaacaccatgcaactatatgcaactatactacactacaactcacatcttcccatcgacccacctcactacccacccacgaccaactcgtacagacctcacgatgggactcttcaagcggaacaaggacaagggaaagagactcgccgatgggagcggggacgagagaccggtcgataaaccaaagaggaagagacctgccagtacgttcactttcacgtccgcgtccacgccacgatcccccctcctaccgcacgttctgtacctctaccctcctgtcatactcggacgtctccccagtacctcatcctcgactcgcgctgatccgcccctattgaactgactagacacggcctttaaacaacaacgtctcaaggcctggcaacccatcctcacgcccaagagcgtcctccccaccctgttcgccataggtctcttgttcgcgcccatcggagcggttcttatctgggggagcaataccgtgagtggtctgcttgagagcttgacgtcgtcgtcgtcgagtggcgcagggtggcatagggtggggagagtcgacggtggggggacagtcgagcacagcatggagggaatgatcacttggcggatgagatcgacgtcgaccggttcatccctcgcggcaaaccgttatacatctttccctcgaggagccatgtcgtccaccccgttcgagccggcgcccgagtcggaaaacagagaccggcgaacctcgacctggaaaccaagccgactgacccgtcttgccgtcccatctacaggtcacggcgatcaccctgaactacaccgactgtgatacctcggccccgacggatggcacgttcgaagccatgtcagagaaccagtacgactgtgagtggtggtgatacctttcttcgctcgaccgtcttgtcccctctcttgccccccgacaaagtcccgcgtgtgatatcgcccgttccggattgattcgttacgatgggacatcatcgcatctcctcgtgctaatatcgacacgacacgctcagatgacctggccaccggacactctggatcgagttacacggccccgacttggtcctttacgaacgactcgtcccgtcccgtcggggagagggcgcagtgcgtcgtcaggtttcaagtcccatatgatctcggtgagcgtccggcgacgatgtggtatcaatccgggctgaaacgcggagctgatgcgattcgacactcgggcctttccggtctgtatcagaccctagcgtctttctttactacaagttgaccaactagcaagtcttcaagcccgtcccgcttgcgtcgcgcctgggacgatgacgctgatcccacacgacatcccgcagttaccagaaccatcgacgttacgtgctcagtctcgacaaggaccagctgataggtgatcaacggactccgtgagtacctacctccctccccctcctctccctcaccgaaaatatctttgccagcgaggacctgccgactaagatgatcctggttctcgcactcgcagtaaccaaattgatgatggacaatgtaccccaatcaccttgagagacggggtccccatctacccctgtggcctgatcgccaacagcgttttcaacggtgagatcgtctcgcgtacgtcttcaccccaatcgaccgactcgaacccgttacccccatgacagacacgttcgtcaacctgcaactgctcaaccccgagggtggatctggtgagggccagacgtaccccttgtccgaacgcaacattgcctgggacggcgaatccaaacattacaccaacaacccacccgggtcgccctcggactatgcggtcccgcccaactgggaggagaggtaccccgacggctacgaatcgttccctgccctggccgacgacgagcatttccaagtctggatgaggacgtcggctttacccacgtttagcaagctttgggcgaggaacgacgacgatgtcatgaacagcgggacgtatgagatgacgatcaacatgagtaagtccccccgcgtgagcgtcgacgtgagatctcgaccaagctgacgccttttacatcggtatcacacggcagactaccccgtgaggcagttttcgggtaccaagtcggtcgtcttttcgaccgtctcgtggatgggtggaaagaacccgttcttgggttgggcatacgtcgccaccgccgccgtgttcgtcctcttggccgttttggggaccgctaaacatatcttgcaaccgaggaggatgggagacatgtcgagtgagtgcgatacgagggctcgtgaagatgaaaaggtctgacggacgtgggtggtcgctcgtgatagtgctctcatggaaccagaacaagtagattatggttgcaaaggaaattacatttcgatctatagaccgggtcgtccgcctttcggtctggcccctttttatccaaacaaaacttttttctttcgctcgtcttgtagtcgggctattctgacgatcctggacgatgttgtacgaatattctttggattccgatcgcgtcgacgcacgaaccgtgcagccgacagccttttgctacccatttcaaaacggtccgatctcagtatggaccaagcgcccgccgaattgatgcttcacggtggtcaaatatatactctagcttgttgtggtggtgtgccgcattgacagctaggccatacaaatcctctgaactctccatggccctagaagagtccttaaatccgtaaaccccttcaataaaaaaacaatcatttgttgattattttgataatctttagaattggagggtctggtggtcttcaaactctagtgatagagtttgtaaaaaggttcaacgacagtaaggagaatcggcaaatgctggatgacatttacggctgtggttgatgccctattcctgatctgctggttcaccttgggtgcactgccgcaatgttgttgcaaggcatggctatggtgggcactgcgtggcatttgcatctggtcaggttgtcatcatacctgtcctcatctggcgggtcggagactcacacacaggcagtagcaacggcaggtagttgtgcacgcgctgttcacttccccgtacggtcgtcagcgccgctcacacgtgttgaaagtattccgagagggtagcaaaaggttgtccagtggctcaaacttcgatctttcgcgaggctcaggcgccagtccctgaagacgccttgtgctgttgtcccgtcttgtagacagaggtgtcagtcgtcgttggcggcctttgtcggatgggcccggcgagccccattggcgcttgttgtcttaaagtgttcttctcgagctggactcgaatcggcgacttccgctatgagctttagtgcgtggtcggatcgcgaattcctcatctatgaaggaacgatattcccagttgatctgaccgaccttcggtaaacgtaaagtgcaacatgttgatcatgagctcaagagacatcgacctatctgccctgtaaatgtttcaagtgatgactgacgacaatccgctcgtagtctacgagcggattgttaggaagctgtcataagagcacgtcaacatcatccctgagcccatggtatccatgtcggcatgaaattagaccataccatttatttgacctgagcactttgtagctcgagcggacttatgggatatatgtctggaatgcgctcttcgaatccgattggctcgttgcttgaagttcgccagccaggacataacgatgatcggtaatacaaatcgtgattggcaatcgagccgcactgccggcaccccgtaccagtcgtcatcgttacctcgagtgagccaggttcgtgaaccagtaaatgagggtggtcaggcgctatgtagtctaagatggggaaactcaacacgacttttcaccaaaagcggcatccaacaaatcatgattcgggacatcatatttccataagcatatacaatccactttcaccgtcttatagcaagtatggcagactccaaaatacgattctcgaggcggagcatcatcgaggcagagtgcttgactttgtctactcggcgacctgaacgatggtatcgtcgctggtcttggcaacggtaaccttctttcgcgaggcaaaaggagggtagttctcgttgtagatctcgtccaatctataaagacgaaaagcttgagctcgtatgtttcactgcaggaccgtttcacgtcgacgcactcttcgatagtccttccaaccgtctccacaccacagaaccaccagatgacggtttcgatcaagtcccagacgacaaagacgaaaatgtaacggttcttcatcctctcgagtgcgataggtccagcgtaggtgttgatgaaaccgaacaagctgacgatgataccggaagcggccagacccttggcacgggtcgtgctggtcaagttttcagcgggatacactccttgcaacggggtgtaggtgaaactgtagaccacgctgaaaaggtagtttgctgtgattggcaggcatcatgagcacgatcccctaacctgacatggtctgcaacacgccgcgttgctgcttaccggcaagcgctccctgtccgagcccgttgttggggttgataaatttgccgttcgcatccttgggctgttgagcgatcaattcggaaagacctccgttgatcgccaggaagacggataggaagaacgttccgatggtcaaaacctttactcggggctgcgggatcgaccgaagcggttagatagtcgttcaacatttcttgtgaatcgattcaggccttaccattcgatcggcgaaaagagctcccgtcactccgcatacggcaccgaggaaagatccgcccaagttcagcgcaagttgggtcttgacatcggtgtatcccaagttttcgtaaatgacgttttggactttttcaaaagggcgagcgatttgggtcggtgagctctttgtgaccggcgatttgttctcaaagagaatgcaatactcacagtatcccaatccgttaccactgaattgaccgaagatcgagatcaagaggaccgagagcattcggtaccgcgagttcttggttacaaagagacctgtcgcaaagaagcacgaacatcagtcgtgcgcacgaaacgtcctacttcgcgaggtcgacatacctcggtaatcccaccacctcttgtcactgccggtactctcagccagagcctcgtccatctcctgcatttctagcttgaccaaggcagagttggggtttccatttccgtggtacttaatcaggaaagcaagggcttcgtctcggcggccgttggcaagcaaccaacggggtgactgcaacaatatccttgtcagcgaccccataggttgtagggcgacacggataaaggcgtacctcgggaatgaaccaaacaaagatcatgacaaagatcgaatagactccctgtccgatcatggggattcgccaggaccagttgttgttgatgttgttgcaagcgtagcagacgatagcagccgggatggctccaccgttccatccgtctggaaagtttcaccacgtccgcgttggctcagcttgcttttcaaggacaagctgagtgttcagacatactgttgtacaatccgacgaaacgtccacgccattgcgctggagcgatttccacacagtaggcaggggcaccgacgctgtgagatagtctgagtatgagcaccgcgtgccaactagcttgcgaagaccgcactcacgtcatgatggcaataccgaatccgagcacgaatctgtttggtgacaccagtaagtttccatcaattttgcatgacgcgataggacttaccggcctccaaccagttggggaatgacgttggcggtagaaacgatgaccatcccgaccacgatgaaaagacctgtcgatggaacattgagtacagcgctcaggcaaagcggccaaacgatgtcactcaccaccagcaaacattcccatacgccttccatacttatcggagatgggaccagcaaagagcgcacctgatccggcaaattttcctcggtaaaatcagagactcgtgcgatcgatcttactgcctttgacaaggacggccacgtaccgatcatggaaccgacaccatacatggagaataccttggaaacatcctgaccggtggtggcgatctcgaagtgcgcttggtattgtttcctggacaggttcaatgcggaggattgatactatcagtcacgaggcctctaataatctgcaacccttcaagacttacatgggcgagatacccgagaacaaggatccgtcgtatccgttcgcgcaggatccgaggaaggtcacgaagctgatgaagcgcaaggggcgttgtcagcccacgtgattggcggatgctaatgcggttgaccgcgtaaagccgggactcacacgcaaaagtacaacaggaacgatgccttggaccgagggttcaaggggtcggcagcgacggcagcagccaacgctgcgctccggacttgcatgatctgcgtctcggtcatccccttggtgtccataccgctgagagcatcaaaggtgaccgaaggcaccccctgtgcgtactcattctcaaagatctcgttcttcttctcgttggtggggctgtccagctcggtgtctacgatcttgggagacatgttgggcggtgcttgatcgatcctcgaggcagatgtggccgatggtccgcggtgatagcgaaggaggctctggtttgtaaaaggtcacggactatgatctttctacctcgttcggacgatcagctacctcgcttatatgtaccatacggttctccgtggggtcccaatcgtcgctccggccccgacaaacagctcgtagctctcctcacgatttcgatgcacaagatgctccctgatccttgatagctaaagaaaacccgaggagacgcctagggtttcgccgcgctgccattccccgctccgctcccgctagtgccaaaacgagggcgaaagccaactcgcggaaagcacggtcaacgcgaaatgggtcgcgttttgtgatatctgcacgcgcggagtcgacatcactctgggcctgagtggcgtaccgaacaatacagctttccaacgccggttcaccctggtcgtgccccgccctgtactctcggtctctcgaggtggatatgatgtttgatcacgggatggatgtctggctctattcggtgatggctcgagcacggagaatattgaagcctgaagcgaagcgaccccggatccacgtgtaacgaaacagggcggactcggcggatgctgatgagcggggaaatatcggttcgatgagtctgcactcgacggagcacctgcctgacgatggtgaaaaggccgtacaacacgggaccatccgtctctcttcctttcgggttcactctgtagcgattccatcaatacccagtcatcagcgggttcaactcgatctcgattcgcgcaacatggattctccgacgaaaatgcaatatcgattcctaggcaaaaccggcaccaaggtctctgtgatcgcgctcggtggttggttgacgcacggaggtcatactggcaatgaggtagcaaagcagacgatgaaggcggcctacgctgccggagtcaactttttcgattcggtgagtacggcgcgcagcactcgtcttgcctagacgaccacacattactgattcgatctggagcgcgcggtttcaggccgagggatacgctggaggtcgggccgaaaaactcttgggtgaggccatcaaggaattcggatgggatcgcgatgatctcgtgatctcgacaaagttgtattggggcgagcacgaagatggctccaagggcatcaacggtcagtatatcgcaacttgagttgaggctgatgtggcgcgtctcgctgatgcaatgttttatcggcagatgttggactgtctcgcaaacatgtcttggccggaatgcgaaaatcattgaagcgcctccagatggactttgtcgacatcgtctgtacgtccttgcgcctggaccagggaccgatgatcgactgctgacgctttccgtttcaaagacgcccatcgacccgacaagtacacgcccatggaggaggtcgtccgcgctttcaatcatctcatccataccggccaaacgttgtattggggtacgagcgagtggtcctcggaggagatcatggacgcctggcgggttgcggacaaattgagtgagcccgcttgacgttccccgagccgcctctttttcccccttggacgctcaacctgtcccgcatagacctcatcggtcctgtcgtcgagcagcccgagtacaatatgatttcgcgggaccgggtcgaagtcgagtacgcgccactctaccgcaagttcaatctcggcctgaccgtcttttcgcccctgcgccgagggatcctcacgggcaagtacaaccaaggcatcccttccgagtcccgggctgccaaagaaggttcctggttcaaggaagagatcgaacggggcggagacatgcttcagagggtcgctcgactcgaaccgatcgccaaggaattgggagcgacgaccggtcaactcgcgctcgcgtggacgctcaagcatcctcacgtcagttctgccatcatcggggctacgtccgtcgagcaggtagaggagaacttgaaggcggtccagctggtcggcaggatcgatgcggggatgatggacaggatcgacgaggtcctgcagaaccgcccggaaagcgtgcccttccgattcgactgatgtcaccaaattggtcaatcctcttctgactgtacgagctctcatttgcttgtaagattatgcatgttatgcctgtgataggctcttaaggggtgtcgtgaaaatgttttacaatgctctatcggctcgtcgtttcgagcccgaatcatcgtgtgaggtcgtactgttgagaagtcaacaagacttcagcttgaaatgacgcacgatcttgcggcccaatcccacgcaccatcaaacggatcgtgaggcgaaaccgtgagtttcgcatttttggcagatcgtgaacgagggcgttgaacagcttagaccatccttgcatcccgtttcgtcgtctttgtgtcttcccacgtcgtccccacatgttgttccttcttgagactctcctgtagctttaggtttcgctcatactcgagttgacgttccgccgctgctctcgtaggtatgggaggaggagattgaccgttctgcagcgcgctcgaggcgttcttggtagccagttcggtctgtttcgccttgactcgagcctcatccttgatgactccttggtacatattctgtttgtcccacgaaatagagtatgggtcagctcgtttttgggaaccggatcggtcgaattgagcactcacggcttgttctgtgacctggatgtggtgaacggcccagatagtacctgctgtgagggcacacgaaccggcgaaaaagatcttggatgctctggacatgatgagttcggatgcgtgatgatgctatcggtttctaggtatatcgagagaaggttagatcgaatgtttctaccctcgaaaatatctgaagctgatcgagcaataactgcaatcattattcataccgatcctgtttgcgatcgctcgcttggttcattctccttaaaacatgcaatacatttagtgaacgcgtgagaactatttcattttgttcaagtgaaatcacccgcgctcactggatcgtgtctttgcggccaccacgaccacgacgcccagcgtctcgaggctgttgacgtcggtaaactcgaaacttggccgtacatacaacgtcatctcgacatctcttacctcctcctcttctcatctatagattctttctagtctctcgtggtcaataacactcgctcccaaaaaaaaagatggcttctcgattcgtctcaaaggctttgacttcgggtacgcaattcgcggaggttatcggaccagccggggaggatcaggtcgtgattcaacacgacatcagacgtttcaccctggctatgtcgattgaccagtcgggatgagaaggatgaatgaagtgactgacaacgatgttgtggtatcgcagccgctcgtcgaccggccgtcgctacctcgcaaaaggttgttgctgcccaggcgtaagttgtcaggcttggtttccgaataggggtatgatcgaggctgaccttgaacctctttatcgcgctcagtttccgaggaatggcttcccgtacgtccttcatcaccggagcacagtgtctgcgggatgtgtttagaccagatcctgatccgacttgaccttgagcagagcctacccccgatgagaaggctgccagcatcatcaactcggtcccccagtccaacctcttcaccaagactggaggtgtcatcctcggaaccggtttgaccgccgctgccatcagctccgagctttacgtgcgtcatcgtcatcgtcatcgttacaggcttcgaagaggtcgatgcattatcgaatgatcctgacgtctttttttacattccccccgcatctgcttcgtctcttcgtccggaaccactcgacacgctctcgtcaaactggatttgggtaccgctctcataggtcgccaacgaggagaccgtcctcgccgtcggtttcttcatcatcgtcgctgctgctgcgcgatccatcggtgctccttactcgtcgtgggccaacggccacatcgagcgaatcaccaacatcttgcagggtgccagggaggagcacaccaaggccatcaccgagaggatggactctgtcaaggagatgcgagaggtcgtccccttgacccagaacttgtacgccgtcgccaaggtaagttccgaggtcgacagttccgtgtgcgtcacgttcgaacgtgtcgagctaacgtgtacgggatcttttcgcgtgccattcgacaaccgtgtaggagatcgccgagctcgagcacaagaactttgctctcgagcaggagaacgccgtcaagaccgagctcaagcaggtcctcgactcgtgggtccgatacgagcagcagcagcgagagtctgagcagctcgacctcgtcaagaccgtcaaggccggtgtcgaggccgagctcgccaagcccgctttcaagaagcagctcttggaggaggctttggctcacgtcgagggtgcgtacgagggagcacgatttcaattccgagaagaggaagctcatccgatcgcgttgacttgccgtttgacaaaggtttggccaagtccaagtccatctaagcgtcgggaaccagtagatggatgggcggggggagcgatgagagcacgaagggagcaaggctgaaagctgtagacagagtggaaaagatgcaaatcgaataaaagaccagctggagagtggacgtgatgggaacgtcgcatcagctagcagaacgggagcgggagtccggcttcttcacctggctcgattttggcttctcattgctcgccttaggtctgtctagaacagatctcgttgtttcgcaagcaaaggtcgtgcgaaacaaccgtcagtgtatctccgcgcgcttgaatgttgaatcatatcgcttggtcgaggggcgtatcgccggccttcaaaccagcagctggtcaatgtatggctacggtcggcgtatcttgtgctgaccccgggttcaaagctgggacggatcttgttgcaagggatcaaagcgatctccttgttccgggaaaatctttcccagacagtagtcccccttgtactgcgcaccatctctgtgtgggggtcgccttcggcgcttgccgtcattcctctgaactgtttgtccgtgacctaagcctgatttaccaggctcaaacgaccaacacaacggcaagggacaagcgaaagccgctatcgcagcttgttagactgactttcctatgcgcctcaagacaacaggctgttcatgcttcaataccgatctacataaaaccatgcatagtatgtcgggctcgagggtacgatcgtacatggtcatcattcctgacaggatgttatgtttgcgaagcgagctaaggcggatccgcaaccttgtccgggctttcgaggcgggttgagcagagcactgcggtcaacatatagtctgtcagttggtcatgcatggtgactcacattgagcggcgagttcatggagtcggactatgggcgaatcgtggacagcgactaggtctgagaagacgatttggtaacaatcagtaaccacccctccccttgcgcgtcacgataaagtgcgaggcgcttaactttggcttgccaacgccatccgtctgctggtcttgcatcgccaaagtcaaagtcggtccgtctgtgctagctgaggatgacagattcgtcaatccctcgcagctttcactcgtcgaactccttggttgataggtggactgctggtccatcatggtctggacgttaccagtcggcctcgtttgagctgctcaggcaagtaaagcaaagatcaaggtctgtcgaggtagtcgacgcgaaggagctcgacgtacgagttccaggtcgcgcttgcggggtcaacgtctgagatgggggctgagcgtgatgatacccggccgacatctgtccggtgagatcgacatcgtcgtagtagccttgtttgacttgggcgaaaacctcgagttgcgtttgctggatagataacggcgctgggggggaagggagacgagcgagcgggatgtccagaccgatgtagtgcggcggtgcatgaccgggaagggaaggaatcgtctgagtcgttataagattgttcgtttggtaaggtggagatcgaccgtcttggtcaaagtggctgcctggcatgtgagattgcggagaaccgtattttccctttcgacgcgggcaggcagatcagctattcggatctagtgacggtgtgggcgtggagtcagaactgaccagaggaatgacgaccggcgggcactgatggccgcaataaaatcgaggaggctgaaagtattgcaaggggacgtgatgacccgatccatcctgaggcggtcaagggatgtacgggaggtatgaagaactcccaaactgttgcctggggaaggtcgggaccgcttgaaagacggactgcacgggaggtacatgggtttgatatgcagtcggatagcacgactggctttggttttgtttataatgtgagaggtgggatgtactgggtaacatcgggggtgataccggtggcaacggtgcggcatggttcaaaggcattgcatcggtattgatcgtgtcgagcttctgacgtttgggttttgcttcttgttttttcttgtaccccgtcagacttccgcgaggcacccttcaccagcttgaaggacccaatgctgggagtaagattcagggaactgcaggaaggtctacactcagggtccaaaggtaaaaagcagccgtagcgatcagatactcacagcaagatgcagtgtctggtacgttgcctcgtgaagggttggggagacgaaggcagatctcaagttatagatccggctggaacttccttgaattgacaggttctagaacataggctgatggtgatcgaggaatgtctagggttcgactcagttgatcatgttttgaggccaacgagaagcgagaagctttgatgtcaaaatctcgatgtgaatctgatgcacttcgtcaatcattccctgcatcggccgaccggcggaggcgacaaagcctgtcacgatccaacaaggcccggtcaactttccaatcgatagaccaagaggttcccgggatcatgatatcgatcatgatggaaacaacaaagcgaaatatcgccgccgaccacgacgacgacgaccgaccaccttgatgaggtctaaataaatgatgatcagcgtagcctgccccgcaatgcacaggccatcggtcgatttgacgagcctctcgatcgtcatcaagaaggattaatgataagatccttaccctcgatgcccttgatggacaagaagcaagaagcaatgctagtagatcgtccattgatcagactcaacgcctttcgctcgccgttggagaatcgttgcagagatcaacgcgttccggagctttacctcgagcttgagattcctcggcgtttcatcaccttcgcccatcttgctactcaaacaagttgcaagatgagtagacgaagatcgtcattggagcttttgttaccaattaccaaacagcaaccgcatctgaacccggagaagccaagccagccaaatcgccattgcgaaacgccagcatcaacccgttgtcaacataaagaatacaattgcagaaaggcgtctactcatgacgcgttataatcatagagaatcaaccggatcaacaacaaatcgcgtcatttactttgatttcccctcgttcgatcaggatcacttcactctcgcactctcgtgatgacgcgtcggacgcgtttcgggatcgcggtggtgttcctcgacgtcattcctgtcgatcgcagcgatcggggacgattcgaccttcagatcgttagaaagggttgatataaaggcactttcgttccacgacgcataggttagaggatatctatcaccagacaaaggcgtatcttcatatcactttcatcgtaaaccccctcatcaccatctcttaccgtccagctattcgatatggcaagtctgccctctgatcactgacccgagactcggttcccatcggtagctgacccgacgacctcctgacagtccaacgacgcctctcttccccctctcgacaaccccgccaagtgggcgaccgggggtgatgcccccactgaccgtcagaagggattcatcagccagctcgccgattccacgggggaagaggtcgaccctgacagtctgaccaagggggaggctagtctgaagattgacgagttgaagaagaagcaggatgagggtgtgcagagcgatgatggtcctagggtgagctatggggtcggaactcgcttctctaaacgtgagggatgtctgatggggaggtcattgtcattatttgctagtcgacgacgacggggagtgacaagctgccttccgaactcccggccgatgagaccagtcctccctccgactctcacctagctcacccagagacctggaccaccggtaattatccatcaacttttcgttcatgatcacattccgagccccgctgatatcgccctcctttttcctctcctaccaatccaggcggagaccctgcgacggacaagcagaaaggcttcatccacgtcctcgccaagcaacacgataccaaagaccccatccccgaacagatgagcaagagcgaggcgagcgagatgatcgagaagctcaagagggcctaggtcgcgctcgtaggaagaggttcgtcgggcgtagggtggttatcgtgtagcatgctttcgtccatgtttctggctcggaacgattcgttcgtattattgtatgtatctacgaaaaggcataatgacattgtgtttcgaatatgaccgtatcgttcacgttagagtcatcctcaaggcctgtctgcaagcgtaggtgcgtgatattctgctgatacggtgcaagccaacacattcgtgggcaagacgccgagtctccgtctgatgcggcatgactctctttacaactcgacaaacttcaaggttgcatttgctctttacaactcgaccaacttcaagattacattttaaccctcgaaccggaagacttcccgccccgtcgtccaccagccaggaccagaagcggatccgacggcgccatcgatgaaagacgtttgcatgggatcggtcaactggaacattatcgataccggcgtcagctcgatcgtgtcacaacaaccagaatagcaattgggttgacgactgaccttccaccaccgctgcgtctcgggatcttctccgaccttgctcatgtccttttcgaaatcctcgggttgacccatgtatcgcatatgagcgatcagcaagtgcgtggtttgtcctaccgcagcaccggaagtagacaaggggagctgcatatgatggatcgaataatctataaagtgtggccaaacacgctgatcagagttcatgtagcgtatcgagcaacgggccgcgaacttgggctcaccgacgacattcgcacgcctcaaggcgctcaacacgctcggccagacttctcgatgcactttttcatactcttccagcttttcaggtttcagtccgatgacttgacagactctcacaccatcgttcgtccggggtggatgttctgtgttgggatgaggctcggggagttggttgacgacactcgtcgccgaggtagagctgatggaccgcatgatctgtagcgaccgggcgggtttgacccatgttcgggagaggaacgacatgatgagtattcaggatatgaacctgtttacatgagatttccactcacggttatagaagatggaaaagatgagatgtgtcaatgtctgtcttgaatcatagtccgtcacagctactgctcgatttccccggtcgatcatcaacccgagcgagcgatctgtctttgacatgccacgcgacaaaggcccggcggcggcgtacagccggcgcgttcactgtcggggtacaaccagcatactccgtcctcttctacctagatctagatcgaaaatacaatgtaagaggtaccataatcattcgatgagtatcgatccatgattgtcactttctggtcgtcgccttagggcaaatcgatcggacgtccgggctgtgtcagaccctgctgagcctgctcgtcatcgcccgcgatagccgaaggagagtaaatgaatatcaatgcttctcattcacatcgccccaaaccgcccaaaatcagccatgccctgctgtatcatctgccatcttcgtcagctgacgtgagctacgaaacgcgaaagagttcgctcaaaggaagcgcaagtttggggggaggagaagaatgcatgtttgactcgccgctcggggtacatagagagggggcgagccattacattgatctggattcagcacttctacaatagtcctgccttgatctttgcgtcacatcccattccaatctatcccgcccctccacaaacaccggccatcgtcttttacgaatgaccgtcacccgccgagatgccatctacaccacgtaaaagcgatcgcaccccgatcctcccgtcagaccaccttggacgagcgttccccctttccgacttcctgacccaacccgtctactcgtccccacgtcaattccctcgagcgtacttgcagttcgagtacgatgacactgccgacgatgaagaggatgacaaaaacgggtttataggtcctgcggcgggatggccgtacgattcaaatttcccgggacattacagcccgttcctcatacacaagaccgtccgcggtccgggaggtcgaaggatcaactctcccgtccctcggatcgatatgagcgtgacgagtgacctggccgacggtgcgacgatggtcgagtcgggagagtggcccaccaagagtgcaatttatcatcacgaccaagaggtcccgacgttgatcatgtcggattcgacgcatgcgtccgcatccctcgcttcggcttcggtccgtcatgcgagtcgtcctcacatccgaggtttagctcccaagcccttccggatggccggcaggtacgaactccatgcagctccggttcacactggacttgggagcagggaaggctatcccgtcgtcgacgaaagtggtgaggagccggacatctggatcgagaccgtcgtcgactgcccggaaggttccgacttgacgacgatccaagaacacatctccaccccagaactctccgagacgggtacagctgtaccgacagatgtcgtcctgcaggatcctcgtcttcgttcagggctcggaagtcgaacgacgagaggagagatcgagacggcctgtctggaagaccccgatgaagctcctcgtgggcgtacgatggagcgcaagaggatgaaccgaaggggtcgatggctcgtccggggttgacctgacctttcgacagatcgacgtcgtagactggtaaccgatgtatgtatgtcatccatctcgccgagtatttcggaccatgttcgatatgcagcggattttgcacagcgaaggctgccgataaacggagttgttttgcgacatccgctcatgggtggttgtctaggggcggacggtgcctttgtgcgagttgccgcagcgcgatatgctccagagtcggggtgaaccaggatcaggaacccgatcgcagccaagtgcgatatcccatcgacttttgttttgtgcctgccagcgatcgcgtgagcttgatgtgaattctcccggcctctttttaccttttcgtcattctgtcttgcttctagtcgtagtgaaagcgcttgagccgaagcgccgcgatatctcgactcgagggtcttgctccttgctcattacgttgcgttcctcccttctcccttctcccccgataccgactcccccatgccttacgatgacctgtcctgctcggcttgctcctccgcttgaccctgctcctgcgtctgagattggtacttgtcaaactgcaacctcacgagcaggggtagctcttcttcctcctcgtcttcgccctcaacacgtgcccgggggtcgacggtagtttccccttcaacagggccggacgaggggtgagctctggaagtagattcagagttcgaagaggtttgggggttgggctcggacgattgcgaggtcgggggtttgtctaaaagaacgcatcggcgtaaaggtaaaagtcgtatttgagatcaagacgtgattctggatcgcgagagaggcacttaccgaagaggttgagtatggagaacacttggttccaattcctcaggaccgatccgacagctgtaccacaacgaaaaacatacggacccaactcgatcagttttaccacgtcgacgactcgtgccgacgagtgctcacctgcaccgccatcggccatgacgtgactcatcctagcgagttcttccaccctcacgagcatgagcccgctagcttctctcaaagcttggagagaggcgtattcttgttgtttctctaggagacgaagttgggtcggggtaagatccggggtcgaggtcgaggtggacgagagggtcgatgggcgtggatgagatatcattgggcagacgtgttcgcgggtcgtaattttgatcaagtgacagaatgatctgatcggaagtgtgtcaaatgttgggatctatgcgttgagagatttgtagatttacatcgatatgagatgcatgcaataatgatggcatgatggtcggatttgttgttgatttcgctcgacgagatggacgaggtcaacggaaatggtggaaataaccggacaacaccccaaaggtggaaatatatgagatttcgattacgtcaaatgatgagaggtgctagccgctcacatgagtgatcgtatcgtaaccgcgcttctcatcgcaatctgaccatcttcgattcttgcacaccagttctacacgggaaacggggtcaacgctctgcatacttggctttggagacagacgattcgaggtccaagcgagcaaagggagtaagtaggtcgaggtcgcgtgatggtttccccctttcaaacgcgtcgcgctctgcttttttgcccgttttgcgcgttgtggagaacccgcagttcagttgggaaagttgattcgagaggtcgtcaaagtagtaaagtagcatatcattcagactaatcgcttgctacttgtcatcactactgcaaccattacaatcagctcacactcatacacacctcggtcttcccttccacaatggacattgatctcccctccaacaccttcccgagtgcgtcctcgacagagccgatgttcactcccggcggaaagcgaaagagaggattcgagcaggacgtcatgcaggaccatgtaccgggccaaacactagacgaagggagtgcggccaaggtgagtggcttcaagagccgactcgggactatgcgaaccggaggctgatccggttgtccccatttcacgacgcttcatcctcccatagcaattacgaactctaccaccctcggcgttcgacccaacacccatctcccccttccccttttcccagtcccagtctcagtcccaagcacagacgcccaatacggacgtctttggctcccagcccatcttcccctcgacccactcgacgcccaatcacaacccgctcggatcatcagccgactacttttcacgcccgcttgctcccttgcacgatcaatccgcaccacgtctgctcaacctcacaccggatccgaacttgggcacgaaccaattcgccgtccaatcgttctcgcaggacctgttccctccaccttcctccgcttcgaatgcgtctggttccagggtcgggttgatgcagcctaggagtaacagtcagggtgggaaccccccggcgggattgaacggatcgggagctggggtcggagtcatgatgaccccaggagctgggatgtcggggatcaatgacggctcggggatgaacggagatcaggggatgatgctcgacgcggaaccagggacggcgttgtctacccccggattggtggaagaggtcgaaaaggcgagaaacgtacacgggtgagcattatttctgcgtatcctcgctcctgtccgcgtctcgtgctcgccggtgataaagctcagttcgtactcgtgcatcttggccccaattcgatatttctccctgcctacgtccttggatgacctactcgacgcagtcctcaatgcaagaccattccccggctcttcctctccgaccacccggaccccgtgacggggaaacgaagcatgtgggcccagtgcaacagctgtggaagcatcgagatggtccccgaccaggcgtaggtttccgaagactttggtcattcaccttcctcaagatctcgcggaccgagagacgggtgccgggggtgatgggctcggtaggggggacgatgaatttctatacaaagtggaagtcgagtaaggagagaggcggggggttagcgatagggttccgcggcttgggttaggagatgcacgtaataagtctgagggaattcgggaaggggctgtgtggatcgttcgacggggtccagctggcaaggggcaggtacaggtagaaatggggtgcagcaatcaaggaccgacgtttctcttcctcttgaggaaaacgccgtgactcgctcatcctggatagcccaatccgacgaaactctctcggactcgttctttcgaaaaagcggccagtccgtatattcaatgacaggcggtctcgacgggatctcgtcccggcctcggcttcgtcttaaagatcgctggcgagtggtcggaaaaggtcgagcggaaagtcgaccctccgatcacgagggcatcagaggctgctcgaaggtgccctggttttccttttggaacgatcggtcgatccgtgcgtccttggttggcacgtggatgaagaggctctgggtctggttcttcgagcttttgacgagaaacttgcgaggccgtctacgtgtttgtggccctggtggagttgctcctcgcgaacgggacttggctagcttgaaactggctcttttctcccgggccgtatcaacccatccaccgtcctcgtgtcgctctcctcttcttgccgagaacccccgtgccaactaccccccaccgcgaaaccgtgtcgagccggacggcttacctgttcacctcccttgccgttctcccactgctggtacttgaccccgatgttggccctcttctcggcgccgacccgttcggactctttgagaccggttcggacggccctcgaggcgatctgggtgtacttgttgtagctgaacgaggagggtccgggtaaggaggatcagtgtccaagtccgggtgcgggtgatggggggcgacgtaggggttaggctcacctgaaaaaggacctccaagtagacatgatgaatgactttgttgtgggtgtgtgtgcgtgtgttatcgagtgagatggagagagatgatgatggatatatcagaaggtgcgatgataataatgttgctggctggctggctggctggctatcgggtgttttcccctcctagccctagccctagcccttgcccttgcccttgctccttaaaacatgacaacttgatttttggaaacttctcacgcgtagtcacacccacccacacaagatccaactagctagagacaccctagacacttcgtcatcatctaggaccaccaccaccatcatcctataaccatcgtcgtaccctatcgtgtcctcaaccttatcaacaatcaacccacacacacaccaaggccataacgactactaacgatcatggactcgggagcaccaccaaccaaagaccaagtcaagcagggaatcgatacccgcacagacgccgaaaaggacaagcaagaatcttccaccaaagatgtaaaacccgtgactccattgaccgtacctcagggtcagtgtcttgtcgatcgagtcgactttagaacactgcactaacaacttgaaacggacgacttccctgcctgccccttgtcaccacgcagagatcaagcagaacctgaccctgatcaatcgggccgtacaaaacctcgaaccgaggttcaccgcgagagtactcaggtcgttgaccacgcttcggaaaaagctctaccgagaggctctacaagagatcgtacacgatgtctaccccaagagtcagtcccgaacgtctctcccctcgccgtcctctacgctgtcgccgtatatcatccgagcgggcaaagtgtgagctgttgctgaacccctcgaatccatggcgtttcgtcccatccgtccatcgcttccaggctctcaatctcctactcagctcctccccctcatctccctcctcccgaccgaatcatccaagctcgccgcctcttcatcctcgatcacccagggtacgcaagccatggagattgacgaatcgaccacgagcaagaatacgagtgcgaccagtcccgcggggcaaatcaagtcgggtaacaagtccacccaggcgggagatgccatactccctgaatcagacgtttatgttcggttgttactcatcctcgggttgatcgacgtcaaggaggtggaaaaggtcagtcggcgcccctccgtccctgttcctctccgccgtttctcgctcgaagctgaacatgggacgtggcgtcattccatcgcatcgctttcccgatcgcaggcttttgacctggccaaggagacgacgacgtacatccaatcgttgaacaggaggagcatggatcacctttccgccaaggtctggttctacttggcaagatgtgccgagctcttgaaacgtgacgaagaggtccgatcgtgcgtgatcccagctcgacccgccccgatgacccgtgctcagctatcttgtttacctcccacacatcccttgcttgcccccgcacagactcctcttggcggcccactcgacggcttcgctgcgaaacgacgaggacgtacaggccaccctcctcaatgcgctcttgcgaaactactttaacagcggagcgtacgatcaggccgacaagttgttgagcaagaccacgttcccggagagcgcagggaacccccagttggccaggtacctgttctacctcggtaagtcgggacgcaggtcactgacatctgcgggactgcggacggctcgagctgatccttcgttcccgccccgcgcgcgcgtgcaggtcgaatccgagccatccaattgaactataccgaagcgcatacgcacttgcaacatgccatccgacgagcgccttcagagaccatcgcccccgggttcatgcagaccgtgtacaagtactttgtcgtcgtcgagctgttgatgggggatatccccgagaggtccgtctttcgacgaccggtcctccgaaaggcgctcggcccgtactttcagttggttcagggtgagtcgccgagtctggcccgagggcgagagagagggggcgagtttcttcgacgctcatgaccgttgtcccgtcctctttttctgcccttccgcccgtgatagccgtccggatcggtgatctcgaagcgttccagaccgtgctcacacagcacgcctccaagttctcttcggacgggacccactcgctcatcgtccgtctccgtcacaacgtcatcaagactgctctccggatgatctcgctcgcctactctcgaatctcgctcaaggacgtctgtctcaagctacacctcgattcggaagaggataccgagtacatcgtcgccaaggccatcagggacggagtgatcgatgccgaggtggatcacgcgcaaggatggatgaagagccgagaggccggaaacgtctacgagacggacgagccccaaaaggcgtttcagcagaggatcgagttttgtatgaacttgcacaacgagagcgtcaaggtgggtcggctcggccataggcgcaatgtcctggtgcgcgatggacatcaaccgagagctgactggtcgtatcacggtgtgttcatgtcaggcgatgaggtaccccctgaacgcaaacaagccgggtatgagtacatctttcctgtccttgtaaccagatggactgaccgtttgcaccccttttcgtcctcatagccggcgaagactcggaattggcgagggagagaaaactcgacatcgaggccgccctggccgaagctgccgaggacgacgatatggacatgtaattccccgggaggatcgaaccgaagagggtcctttgtaatgccgtccctcactctacgacgagacgaccttgacgagaatatgcatcatgatcacgctcgcgatcttccactagggcgtcgaagcgaatctgaggcgcgaagagcgtcaaatcaagcgtcgagtcgtcatccacttgatcgttttgggctggtccatactataaacgtccgtctcgaaaagggcgggaccatgataccgctgccgaagagaccgtgtaccccagtgtatgccctttcaccgctctcaaaggtagatcaaaaggggtatctgcacatcttggtcgatcgtacagagcctccaacgtcaatcacatcgaatgtcttcagcattcggggcgcggatagcatcggcgcggacaaacatgcatcaacgcgggcgaaatcagccttgtcttgcggactttcgcgacaatgtcgctgtctgcaggaatagctgaagagtcacatatcgatgtccgactatggaagaccatattacggtcgcggaagttgaccttgccgttcattcgtctcgtcagcctcggtaccttacgtcggcccagcatgcctcctccacctaccggtggcattcgtgccatgacctgcttttcaatagccatctgatcggccgtctcctctttgacaaaatgtagatatgcttctgagtgtgtgtacaagacgatgctgtatggatacacaatgcggacgagaaaagaccttctagtcgagccatttgccaaccttttccatcgctttccagtctccctttgccaggctgtcgtcgccaacaactttggcaaccatctcccatggatccttcccacctccccatcggagtacctcgttccggaacttttcgccaccttcccttgtcagcggtgcgtccttgaagagggtcgaccagacttttttggcgatcgctcgatcaaagagatacgagtagtacgtggctccatagccatagaggtgaccgaattgcgcttgccaagccgtgcccgggacgggcggaatgacacccatctcggcctggagttcgtgatagatccgcgtcgtatcaataccatcaggatcgcctgctgcgggcgaatgatacttttgatcgagagatgccatcatgatttggccgttcgtttccaagttggtcaagatgctcgacaattccatgtgcgtcttgaaatgttcaatggggagcggcatatccgtgcgatagtgccgggcaaatagaggaaggacgtcaggcgacgatacgaacgactccatgaggatcgaaggcagttcgacaaagtcggttgcgcaacgggtgccagagacgttgtggtactccgttcgaccgagcatagctgtagccgagttcctgaatcagccttgtgtactgcaatccgaggcacaaaggactcacagtgaatagcgtgacccatttcgtggaagagggtctcgacctctggccacgccagcaagctcggcccgtcctctacggtgggccttacgaaatcggttgtcaagacaacaagaggcagttggtacctgccttctttgcctttgacacgcacgccttcaaagtcctccacacccgtcattccgagtgaccagtcccatccagagggaagccgatcccctagggcatcatcgttgtcgatacgccgagaacagcgaacggtataatgagccgcgttagggctcttgtttggccgattgaacaggtcaaagtaaatgataccgacgagtccttcaacatcgtccataacatgaaccttgcggacgtccgagctccaggcttcaccgggcctcaaatcggcaggtacgaatctcagaccgtacaggcgattgaagagcctggacaatccttgcacgacagttccagccgagaagaattgcccgatcgggtgcatcctagcgccgggtgccagactggctgcaagccgttccgtaaaatagtccctatcccacgcaaagaccttgcccccgcccaaccttgcgagaccagtcgagtcggcattcttcatctgggcgagggttgccacatccgcgatagctcgaggccgaaggttgtccgctagagacccgaggaacccctcgacatttgagggattcttggccatcttgtcggtcagctggacttcggcccaactctccttgccgagaacaccggcaagctcgccccgcttctgtaaaaggtcctccaatacgccgacgcgttcggaatcgtacgcattgcttccctcgtagactaacctcctcgcttgactgttcggtgcatgacgaagaatcatctgcgcttcccagctgtaggtcggaacaaaacggctgctcctaggtttgcctttgactgctccaaaggcccctccgcggggcaaagactggatgaacctcttgtccaaccctgccaacagctcgtccgcgttgggcagctcgatcagggtcgtctttcccacaccggcagcttcggcattcccgttctgtccggcagcgacatctcccaagaagcgtcgaccaaggacctggatctcatcagagagatcgacgaaccgctgtcggcgagctgtttcgaggtggatcccggatttctcaaagtcgttcatgaatgtctggatgagctgatgttcagactccgtgaggggagggtcgtgaggcgtatcgcggcacagtttaagggcctgcatatgagtgaaatctataagctcaggtcactgtaacagcagcaccctaacgctagacttacctcgtacaagccttgatgcgtgttcaggccgttcatatacctccccaacacctcgtaaaccgtgtccgcctcttgaacccatttctgttctggatgaacgttccgcacgagctcggccatatccatgaccaggcacaagacgtcactcaatcggtcgagcagcttgggagtctgtcgcagagccacagcatactcggaagaggacggatgcagcgtgacgaagggcgatcctggaaaagtcggttcaaaatcgggcaagactcttgttatacgatcaaccaggtggtgggcgtgtgtcaaggtctggccagtgaggacggtaaagtatttggcgtcccgcaagtttgggtgaagaaagagcccagtagatggagccgaagctgacggagcggcagcataaggagaatcaaacatttgtcgtaagagactgtcgtcctgagtctgagaagctcccgtgacccccggtatcccctcaaccgctgtcttgcttcgatcggttttggcggtagctgcagcatgattcttcctcgacttgttcctgaacgagtctcccgcagcccgttgcctctcgaccgcacgttcgccgtcaaagctcgacaggccatgaagccaggcggtagaagatcgttcataggtcttggtaggaccggtaaagacgctcgcttgcaagttgggtttggcgagagactttggcgccctgaaggtcctgaacgaggccgttgaagtgcatagcggtctgatcaaaggcgattggctagaacgcagggattggtgggaatgtcgcacgatcatcttggaaccgtcactggcttgccgtagatttcgaaagggagagcgagggtttggtatatggagcggatccgaggtatagtaaggtataagtgttccagtgcaatcctgatatgttggttcagaccacgttgatgagcatgtatggcgtcagaacgattccgtgatcctcctagatcaaccaattttccaatacgatcgaaactgcgagctagatcgagcccgtgacaaagaggtgaaaagcgagattgccgatcctccacttttcaacttttttctctttatcttgcctgatggcagtggtgaccctccttttccctgcgagacacgaggcgagtgccgactcgtcgccgttattcctcttggacaacacagtagattcttcaggtatgataagccagtcgaaacggggtcggcacaacgtgttgccggtctcgacgtatcggatgaaggggacggaacggggtatccaccggtacgccgaacaatgaccgatgtcgatctcgtatcgacctctcagatccgcagtcgcaagagatcagaggcaaagtatgcgactcaagtgttcaaatgtagtctagtccgctactgaaaaatactgatagcagaatgggacgagttgcttgtgacgtatatagggttgactcaattcgatatcggatgacccggccgctctttgggctgacgatcagctgttagctcgaccgagcggcaaagggacgcgtcatctcgatcgagtcgtctcatgtcgggtgcagagggagggggtattctactcgtccttttatttattattacaaagtgagatcattaggtatgacgaacccggtatacaatttcaagatcaagtggatacaaaagaaacatggtcctcgagctcggtcgctggcaactcaatcctcctgctcaaagtacccggcaaacatcgactcatgcctgagcttggatccttgcacgaccgagtgcacatgggtaaaaagcgtcgggaagcgagatgtaaagtaatgcaagaatcctgcgggaagcgaacctaggcgccgtttgacgttttccggtaggtctgcaatgcaggtcaaggtggttcagtcagcgcggaatgtcaggagtcgaactgatggcgttgtgacggaccttgataatggtgtttctgctcgatcaaaaatgagataagacggtcagccatgtctcaaactgtatcctcgtccggaccacttgccttattcctgagtgcccgcagcaaatctctaagactcctcgaatcgtactttctatgtttgcccaggttttccaaaaagacagagtccaaacgcttctgccaagactgtccgatgacgtcgatcgacttgctctccaactgacagagcgtgggctctgggggctgcagttccataatctcgaaacctgaggaccgtctcccgatgagcccatctgccctatcgtgttcgatttcccccccaatgcaactcacggtcggaagcgtcgcagaggaacgcgagacggcgagcggcggtccagaacatcgggtgaaccatgcagatcgatgtatcaggtctgtccagccaaatgcaatgacgttagctttgacgctgataccaggcggaggtgagagaagctcaccgctcgtttgaaaccgcagacaatagcttggagaccagacatttcgcttcgtaaccgtcctcgccatagctgtccaacttgtcgagccctgtgatctgacctcggacaatattcatttccctctcataacggtctccgtatggatggcttccaccggtcatgacgtaaaagtacatgcatcccagcgaaaacaggtcgaccgccttggtcagacgagcttgtcggccgggaaacgatccgtcgcttaggtgcctcgctgtgttgccgttcaagaggccgagagagctgtgtgacgaatcctcgaacaggtcgtcgagctgtacttcccctcgtaggcactcgggagcacgccaaccaatcgatcccacggcgtgattggccgtctgcgcgtaactgctctggccgtgatcgagacgcttcgccaatccaaaatcggaaaggagcatgcgttgtacacctttactattgactgaaacgagcacgttcctgcgagatagatctgttttaacatccagtcccgattggtgtgaaagcatagtccgacttactgtggtttcaaatcacgatgaataatcttcagactatgaaggtgtttcaggccagatgtgatttgatagattgacttcttccggtcaaatccgacggccaggtcttgatgagccgagggattctctacaatatcggcaagcgatgcggaacatagctcgagcgcgatgaaaaggaagttgtcccgcttttcttggtagaaatctatcgggacgggaagattagcgggtcaggattgtgtcggcatcttgtacgagccacttacatcggatgacattctgatgatcgtcgcttgcctggagcaaggcgacttcttgtgaagcaatcgagacaaagtcccgcagcaacctcttgacggcgactgcccggccttggaatacgcctttatagacaaccgtaccatgagagccaaagcctgcagggagagggaccaaagataagcgtccttcacgaaagctgatttagtcccgttcacgcgaaagacatgaactgaccaatgacgtcgtccgtgaccgacaatccgtccacctgggtgacgtcgtgaccctttacgacatcttccgctttctcactcgactccggggcagctacgaccatctcgccttggccgccctcttctcccagaggttccacttcggtcacatctccatcatcgttatcctcttcagtcccgtcgcgcttggcgcggtgcttttttccccgcttgcgacgccgcccgttgggtttcttgttgttggcttgttggtcactgttttccgctggcggagtggtcacactgtcccgtgccgaaagcgatccctcgtcatccgtgggaatcgccggcaatgccttgtcaaacgccatagatgtttccttgggttgcctgtcgaggattgtggtcatctccctggctgcaggcggtatacttggtggctgacgtcgtgccgacgtcatgagccagagcaagacgatagctaaaaccatcaagagccctagggacaaccaatcgggacctcgtctccagcgcgcatcccaacccggatcgacttgtcgagctgactgccctgacttcacttcctctctctcgggcagatgccgtgcgtcttctggcgccggcgtaccgtctccctgcacgggatcgatcaacgggggcaaccgctcgctgatggcctcttggaccgcatgtccacccaataacgagccttcctgcgctggaggtgcgtatccgaccagcggatgattcgcgctggacatgatgaagtacccttgttcctcgatcgactcgtcactcccttgtgtcacaggtaattggtgtaccaatgccgacggtggtaggcccatcaattgaaggttgttttgcgactcggggaacagtgtcggaagataggcgggtggctgcggcaacaagatcggtttcgacccaggcgcggcaggcaagaggacgtcgaagaccgagaccccgacgctgcccaagtcggtgatccacctcaatccctgttcctgtaggaatccggcgacgctcccgtcatacaacatctccaccctccatctatcctcgtactcggcttggtctctcgtattggctgcattgaaggaacccgtgtatcctccgtatttccgaccgggtctgacgaatacttcccctttgatgtgaccattcttggaccagtagtcggcgagatctctatgaacggcattaggaaccatgcgtgtatataggagatcctggatgatgtccccactgtgtgatcgcataacgaggtgataatctggaggcaagaatcgcccatattagcttccggtttcaagataccaacatccttgaagtcacataccagtctgaccgatgtacaagagatcttctgggcgatcatcgatatcactctcgcactcctcgtcgtctatgccttgcaggccttctccgtccggtttacagacccccaaaggcgtagacctgtttgtgccaaacgtccctacgttttgacccgtctgtaggtccagcccgataagcgaggtggtcttgctaccgatgaaaatatgagccggatcttgggggaaatggaagggtgagaggtcgatactgaagcgggagtgcagcgttaaagcaggggagagcgcggggttggagatgactcgactcacagctcttccagcttcagaggtagtttctgcatgccttctcctggtccatccccttctcctccggctttggtgtgtacgtataattgtccgtcatgagggtcgatgatgtaccaagcttcgcctgagcttgcattgtaccggctcctaataacccctccaccttgatccgaaccgacgaccccgttctgtgaccagatcttgcgccctgtagatctctccacggcatgtagccctccatctatcgtggtgatcaagacgatatccagcagctctaggtcctcgaaaccgggtggtttagccttttgagcggccccccgagctcgctcctcgtcgttgagcagctgtcgtctggcttgtcccgacagagccagcgcgatgttggaggctgccggagagttagacccgtcttcgaacggcggatggaagagagcaggtagaggatccggtgtgggttccgcacgagctgttccgagtggggactccccgttcgataggaggagtgtacataggaagagcaagaagacgggtagcagattggacaaaggcgctcgtctccgatgtgacgattctggcggcttcatgggggcaccatcagctcagcaaatgacatgtgtcgattcgaggaatattgtagatgagtacaggaacatatgaatgccaatttgcgaaagtcctaaacctcaactttaagaatcgtgattgttcaagtgcagcaacccccccaagccgaagctcggtcggccgacccttccacgaatcacgtcacattttatcatctaattacacgtcatagtcaatcagcttggccggagtgatcaatcaattcgatgatcggatcgattacgttatctgaatggtcacctccgatgaggatctggggtcgagcgatcacctcgctgccattgacgacagggtcagcataggtggatgatgctttatatcaacacttcgatcgaatctcacaccgattccgttcagtcagacgatttagaacgactctatcatacgctatcaacgacaagcttgattgatagcaaaaatggccgactcgatggaagtagacaagcaacccactcctcaggcttccggtagtgtcgctaaaggaaaggcacctgccggaaacaaggacgagcctcgtttcgttgtcaaaaaggtcagtgtaaacttggtagataccaccggctcattacaaccgtctaaacttatcgagctgtgaatgttgtggaatcagtggaacgccgttgcgctctgggcttgggacatcgttgtcgataattgtgccatctgcaggaaccacattatggacctctgtgagttggaaccgagttcatatgttccaacgagtcgctcatcacgccactacgcacttcaggtatcgattgtcaagtcaacgcctctggagacgacagttggtttcacccaaaggacgttccgactcacgggtgatgactaacctctcaccatgtctccacagacaattgtaccgtcgcttggggtgtttgcaaccatgctttccacttccactgtatcaacaggtggctcaagactaggaatggtaagtcccggggttccgctgtgtcgttcgatcacacctggcccgaagctaatccggttacttacccgtgctctcagtttgcccactcgacaagtaagtccgatcaggtcgagaagcacacaatcatagatcactatcctgatcattactgttttgctcttcgtagccgaacttgggaactccagcgctacggacgttaagtgcctcgccgccaaacctgagcatacgaagcctctaccgttctccttcctcgctgcttacgaccgacaatactctcgccactacctgtttgactcggcgctttacgacattctcctacaacttgtatcagtaaaatctagagcggtttgtgcgcaaacttgactaccaatatcctcatcgcaacgaccgttgggagcatagccaggggtgatgctcaggaagtgaatcaacatgttggtcctgtaaattgacccccaattacccgataatcaataaacatgacaacgtattccccgtatcccccaatctgatacagtgcacgctcgcacggcctttcagacttatagaccccgtgtttggggtgaaagctgcaaagtctaagcgaagcctggacctcaggtcgaaggcaatccatgttcttccttatcttgacctcacggtcgtgcacaatcagacagcgcgaagacggtcgactaaatccattcgtccgaatatttactgtgatcagccgccattaatggcgccgatctgtcgtacacgtagctatacatttccattgactcgtagaagaaaaaaaaccaccatgcccatcttccggacggtacgttggagccaagacggattcgttacgtcacatacatctcgctataccgaacccaggcttggtatcagatccattcgcaagtcggtcgaccggcaaaggcttacctctcactttaagggttctttaccactagtgcttgcaagccgtgttggcctttttctgtcttgccttctttgatcaagccgagacagtttcggcagatgccctcgtgtgctgttgtcactccggagtgcctctctctatccgctattctggaagcctgcgcttcttgcgtggctagcgacatggcatctttgagtcggccgagctgtgattcaagttgggtgatctgagtatgccaggctttcctcgttgctgatagctgcagtggtatatgtataaacaactgacgggtacagtttatccgggacatgaagctcacctcttcctctagctgtttgatccgggccttgtcatcgtagtagtcgccgtcctgcgagcgctctttctcgggctgaaacagcgagaaattgcggcttttcatggcaacgagggaaaccggttccgagtggtcggcgggcggtccagacaaatttaagctatctccatcgatcgtcgaggaatcgcgctgggcggatcgaggcggagtcgcgatcagcatcgaggtcggtctgacccgcacagatgcggagcgatttttggtgtgccggtcttttgtgggtgtaatgagttggctgaccgttctggatggcctcgctttgacattcggcatggtattgctgcgcttctcccctctgattttctccgtctccttagtcattaaatacgccgccctgatcctctgcgactccgacaaaccgtctggacccataggctcgtcaggtatgttccgagatagcatcttttccctcaaaaagctcataaagccggatcgctttggtttgatgactttcagaggttcaagctccctgttttctttctggggttgggggaatgtatagagtggcgagggtcgatgattcgagtcgggcagatcgaatagtctctctggcttcattatgaccggagtgattggaggcgtagccgcgatgtcagacagtgccctcgatcttctacgtttgaccctctcgagccccttattctcttcctgcaagctcatcatactgttggtccccctggaccctgcagtttcgctccttgaccggaccgcacccgtctcgctggtcgttctcagccttttcatcgaagggtggaccgtatcttccgactgttgacgctgccgagtgtcgtcgcgcgaaggccgagtcccgcctcccatcaatgtatgcaccatcgattccatcctcgcctccctgatagctgaatctcgtctgacaatccggctcctgcttgggagcttgtctcgatcatgtctcgccgagccgaggtcttcggtgggacgagggatctcgttacgatcgtagagagagaggtctagcatttcccttgcgggggatggtgaagtcaagggtcgttgaaatgatcgatggatgtgttcgggaggagagtcttgaggataagctacgtatccaacaggggaagtagcgtaggtccgttcgttcccggtgaagattgccagctctggcatgtgtgccctcgaccgttgctggttcttggtctcatacatactgtcgtggtggagaggtggggatcggggaccggagttttcggaaggttcggtagtgaatgagccagaggtatcggtctcggtcggtgccggcgactgatcgctagacttctttcggctcaatcgcccaagcggtcgaatgacatcttggacgagactgctacttttgttggtgatgcgtgagatcgtgctacttcctgtggatggacgggaaagtctcctccttaacggagttggaattggcaggccatcgcgtccgctgacatgagcgggccgatgcgtcgcctcgatcgccaattcctgggtttcggatcctctcgtcctccttttctcagcggtttccgaggcgatactctccgatttgctcatgagcgtgcctgctcgacgaccatgctcttgattttcaacgccctcgaacgtgaagctagtctttcgcagtctcgggccggcattcaaggataccacgcttatgtctcggtaaggccgttcagccgagggaaagacactgtcctcgtgactagaacgcggttgagattcgtcttcgatctcgactcgcatcattttcgattgattcgtctctgagggacggtcgtatgtttgggtgatgttgtcgacgagagatgtagcatcccggaatcgagattgacttgagaatgaagaggtgaattgagaagagagcatgacggtgtctcgcgctgaagcttcgccctagtgaaaaggggaggaagctcaagggtaagaaggactataccagagcttcattggtgattcagtcttaggtgtcggagcatctctaccaacgtccaatagagctagctatggagagcgaacatctatttgtttatctcgctcgagtgctgatgtcaattttcgcttgtttccaccctcgcttgatccgttgatgaaatgatcaaagaatgtttcttgatcaaatcatcatccatcatcccatcaaactctgtcgacgcgtgtgctgaaatgcgacctgatgagccaaaagaattgatcgcgacgctgaaacgtcagagaccatggcccgcctgacgtgatggcggtgacgcgacttgagcctgacatttatgatcggtcggttcggtcaacgtctcttcttgtagctcgcgagcctccgagccttcagattgtctctcttaattttgggaaggtcattgcggttcagcactctctgatatgtgattcgattcgagagcaggatcgagattctatcgaaaagatgtggataggattgaaagcgcttcccacattctggacgccgctcctcctttgcttgtcggctgtgcatgcaaataccgaaattatcaatttcagtaccaagcgaggagtcgaagatgccagagcagcaaaagtcttttacgggcataagcagtaggtgccatgtccttgttctgcgagtcctggagatgttgtacaattgactcttcgtcttgcttaggattgatgccatccttgaacctcccaagatgatattgaggctgaacacgacctcgccggatgagcagcaatggcgcatcggtgttctgctagacgaagcagcaggcaattctgcaaaggcttcgtggaccgctcgtgtctcttggccagccactgtatgtcaacctgctgcagaattcaacgtcaaagggacccacatctgatcaggacaaacatttcttgccggttctctgcacagatgccctcagactttgacatccgtgtcgtcccctggagatcgtcggaccgcaaaacggccgtctcttccactcacgatcgtctcattaccatcacccggcggtataccggtgtgccctttccctcggaatctgtcctcactgggtggtcggagcaagctccaagcaacctcgtaggggtcacgttcgacctgatcgtcgagccgttgtctttcggaatcgtgccatatacagcttggccgacgatatttagcgtggtgatgatggctttcctagggtacctgttcgctaccaggttcgtcctgcctcgattactggacccgctattgacgagagcggacgcgaagacggaatagaccgtgctcgagtgaagtcgatcagcgagaccaagttgtataatgatgcatcgtttagcatatttcatattctattggctcaatctttggctacatgcgacatcgtccgtgtcacttccccggtcagacaaaacgaagatacaaaagcgagtacaggtaagaccgaaataaattctgttgttaagagacacgacacgaacaccagaaaggttgcatactgccaaaaggagcaaacaaatcgcctgctttcgtcctcagagcgatcatcatcgaatcctagcgaaagggttcagttcactgtcttccctcttcttttccctgagagcgacaacggcctcttcgctcgccagctcgtcgcggggagcttctccgttccttcccttctggaaagcgttccagaaacgcaacgtctcatctcctgcgcccgtaacgatggtctgtccgtcgggactcatggcgagatagagcacacggagggtatgacccgtcagcgtggctacgcagttcatgctggggtacttccacaggcagatttgattcgaaacggctccgcccgagtacccatgcgtggaaacaatctcgttcgagttcttggcccacattagattacagacctgacgtcattgaaacacctgattagcggagccgcagaatcagtgacgagtaacgattttaacttgcctgagatccggtatcccattcgctaagcagggtgccggtgagcgtgttccaatatcgaatcttcttgtctgccgttcctccacccgtcgccaaaagaccgttttggtgagggctccaggcaagcgctttcacagccgcacagtgttgattgaacttgtagagcggtgtcgcattggtgctgtcccagatgtaaagcttgttgtcgttgcctcccgatgcgagctgattggtcgatgggttccatttgagtccacagacctcttgtcgatgcgacttgagttgttcgatatagtgctccctgacccgcgtgtcgcgatgcagaatcgtcctgtctcttgagccggtcgacaggatatggccgttccaagcgagcgctccgacacgaccggtatggcctgtcatcgttcgtatccgtcgattcgcttcagcgtcccagatttccactttgccagcccgggtccctatagccacggtactcccctgcaacgaatcgaggaggttagatcgccccgcagttggtcagcaaattggccggctgctcactctgttagtccattccagcccagtcacttcgtcgatcgtctcgtgaggcgaggctccctccgcaaaatcacatagcctggaaacgtcggaagtggcggccgtccagatatagactgagctcctcagaccgacggcaagcagattactcgacgaccaagacaccaagttcaggtaaaagtcgtcctacagtaaaggcgagcaatgagtcagggctactcgggtaggcccagccactaacactcacggctagctctggcgcgtctagaaccttgaacggcgtcttgctgatccatctcgtcgactttttcgtgcccaacaatagcttctggctgtccctgctcattgggctcaagctgtacttttcgtgcatcatgtcgtccaagcccattccgactcccgtggcacttttgtagcctaacccaatgtttcccggcgaagccttgacacctccgctgcgagagctcgggctagacctcaaggccgaggtgggcgaggaaaagtctaggacgcgccgtttggtcggagtgacaggcggttcgccttgtactggagtggatcgggaagtccgggatcctccggtcgcgaaagcgccaacagcagatgtccttggagtactaggtgaatgagcaggtagagggccgagcaaagcttcgccgttatgagaggtttgatagagattggtcgattggctcggaccgttgtggcggataggaacgtttggtgccgacgacgtatgagttggtgccggtcgatcgatgagacctggtccaaacagtgtcgatttcatcacgtcttggtatgtgctcgtggcttcatctgtggtcgccgtaaaacaaaacgcccggtcggttggaaggagatcgtaacagcacgagctcgagtcggtcgacatgacgtacctctaatcccatcaccttcagccatcatcgatctcttcctgctccgatccacttcggctctcctagcgttgatcgaagcggccaacccttcgccgtagatcccactcggtacaaagcccgaagtagcctcaggaccgtccggcagaagcgtgtatgcggcgtgcaagtcgttattcgaccgttgcgggatgaatctgaatcgggagcgccatgaggttcaccactcgtatgtcacgcgacgcctgcctatcctgccgactcacctgtccccgtaatccacgcctttgcctttcacactcctcatcccccttgttcccatcaagcctcccgatccgatcgctcccgtgttcaccttgtccgctccaccgctctgcatcaagattccttctaccgacagacccgctcggtacttggccgtccccgttccaggcgccggaagatcccgttcagggctctttgacaagaccggtccagcctttcgattcctggtcggcgtgaccggtctcgcttctccatctgcagctccatagacgatcggttcgatgatctctggcaggccggcgtctttcgggttggcagatcggggcgtatctcggaacccggctgctgggccgatagcggggcttccggttggactcagaaggacaggtgaacaacttgcgctggtgctccctgtcgtcaggttgggagtggatcgagtgtggtaaggcgagtagtgatgaggatgggtagcaccgtgtggcgatggcttcacgaatcctggatgagcggtcgcgttgccaacgttgctgttgacgctgctacttgaccccgaaccggaagctggcatggagccatgcatgatcgctccgacaatgccgagaccgctagtcgacatgcctgcgggtccgccagaagaagcgaccggagctgggctgcccgtagaggtgtacgtatgagggttgtggaaagggatggatgccccgctcgtcctcgtctcctttggagatgccgaacatctcgttctgctcgacgatgccgggtgaccattaggctgattgcgtgtggtagacgacagatgtcgagaagtcgatccggaagaggaagtggatgggttcgaggtactgttgctattcgtgggaaggtgattcatccccatcgtcgcggtggacccgtgatttcggggtgaccttcgagcgttggtcgacatggcgagatgatttcgcctgctcgttctcgtggcaggcagcgtgaaagtagtaggtaagagatgatggggattcgagggaaaggattggtcctgttgtttcttgctcgaaagatacctggaccgtcgagacgtatgacctcgtcaagaccttgaatggtaaccacgacagatgatgacgtgatgaaggaaaggaggaagttgcttgttcaagtcctagaggcgatgtccagcctgtgattgttgtctagttgacgatatatgattcgaggaggtgaggttcaggttgctgcgtctctcccttgagtatcgagaagtggtcgaaaggataggtgtttcgaattcgatcgccgtcttttgtttgtttactctcgtcgctttaaatgtcggcatccatccgagagacacacgaaaaagaagggaacggtttcggtgatccgaacgaatgtaaaagaaacggagagatgattggagggtagatggaggactgatggatgacgagttgagggggctgatgggtcggtatcgtcctgatatcgagtgatcacgaacgaacagagttgccgaaagtgggtcggtcgcctcgaccgcgtccgcctgaatcgaatcgcgaggttcaaccctgcaccctcgtctggtagtgtatccgagtctatctgaatagtacgataggtatcatgcgcccgatggttggggtacgccgacattcagcatttggagagttccaagttgaatatctgtctaccttgtgatctcggcctcctcggtcaagagcgagcgagcgaggtcgacgacgtttaccaccacccgctttgattgctctgtgttgagttttgaacccgcgcgacgagaattgatcgcatggaaaagaacgcgcgcgcgtcttgatggaaagtcgaactggatcaaacacattgggctaggtgaaacctcgtgataccctcttgaagctcaacttgggcatgctaggctccctcgagaactctgataggtcacaaaacacattgaggagcgagggattgtcaaaaataatgtcgttgcacccctcgtcagtcgtattataacccgtctatctgagcgggtcattcagccgcaagcggatcgaccaactttgtacatgaacgatgacgtcgcctcctctgggcctaccggcaagaccgagtggtactttttggctcgtgtgagaaagaatctgatgtgagtgaggctctcggcaagtccgtttatcgtggttgggctttgatggcgtaactcggctcttcctagacttcattgactacctcgctgaacatcaaggaccggtgtctagccagtgatgtatggcagtggatgtaccgctgccgttgtttttgatagtgcattcgatgagttcttttggcgggtaccggatccatgcacttgacttccttgagcaattgcatcgcgccccgtaattgacagagcgatccgcatgtagcgtcgagcgtcacgtcattggccaggaccgttgtgggtaaaaggtgaaggtgataggactactccaggattaacattcacgagtgcgggaattccggcgtcgcgttcagtaagatggcaccgggatgattcgaactgcgtgcaacgaaccaaaaggccaaggtcgacctattcggtgatcagggtgtagctgcccgatccgctccagccgtcagacaaggtaggcgcgatggctgcttcggtctggcctaccttgagttgcattagaaataccgacgaatctgtaaatgaggtcagagttctcgacgtgtgcaatcgatgaagctctggaactcatgcgcgacggttctcttggcaagcaacatgcccggcgccctctgacgttatcagacgtccgctgtgagttactaaactctactcttaggttgagcgaatgctctgcttcaggctcaacttgtattataagatgacgaccaatgtgacacgatgatgataggaccgctgtggcgtttcgttgcaactcgcgagaaaaaaaaacgcaatgatcgggcaaaaaggaaaggaccgaatgggggttgatcccatgacctaaggatatttgtaagttaagacttgcaatccttcgctctaccactgagctatctgtcccttgatgtcgtgtcaaatcttttttaaaaaatattcttacaaacagcttgtcaagctctgtccccacccatccgctgcgtctccgctctggttcccgcgagacgcgaattcgggtgaaagtcgttggaagccaattatggcgagtcggttggaaatgttgagaatgacctcctcgaacccaccatatatcatcatcctcgccccggtcgatcgatctccactccacaccatctcccagcatcattatctagacctcaagatgctctctcgttccatcatctcgcggaataccaaaactgtcaagcgcagcttgcacacctcgacccagctccgagccaaggaaggattgaaccgtcattcccgaaatgtcacccaggacaagagtcagggtgccagtcaggccatgttgttcgccactgacggagtagagaccgatgccgactttcaaaaggccatggttggagtggccagtgtgtggtacgagggtaacccgtgagttcgccgtgtcgcctgtccccacagctggataccggcgagtcctcgacggctgacatgttcgaacgttcgtagctgcaacaagcacattctgggcctcggtcagcgcatcaagaactcgatggcgggtgccggcctcatcggataccaattcggaaccgttggagtgtcggacggcatctcgatgggaacctttggcatgagttactctttgcaatcgcgagacctcatcgctgaccaggtcgagaccgccgccggtggacactggctggacggaatggtcgtcgttcccggatgtgacaagaacatgcccggaaccctgatggctctcggtcgtcttaaccgacccggtctcatggtctacggaggtaccatcaagcccggtcaatgtggtggcgagaagctcgacatcgtgtccgctttccaagcctacggtcagtacctgcaagaaggtcagactgaggaggccgagaagaagcgatacgatactatcaggaacgcctgccccggagctggagcttgtggaggggtaagcgtgctgccgccgaccattcatcgtcatatccagagctcatttctacattctgtcactcgcagatgtataccgccaacacgatggcttcttccgccgaagcccttggaatgaccctccctggatcctcctccttccctgctgaataccctgacaagctcgccgagtgtgactcggtcggtgccgccatgcgaaacctcctggagctcaacttgaagccccgagacatcatgactcgacaggcctttgagaacgccatggtcctcaccatggtcctcggaggttccaccaacgccgtccttcatttcctcgcgatcgctcgttccgtcggcattgacctcaccatcgacgacttccaaaaggtctctgataggatccccttcttggccgatctcaagcctagtggaaagtacgtcatggaggacattaacaccatcggaggtattcccagtgagttgttacccaaactaggaactgggtcttggcctacatgggtcgaatgctaatgcaacctttcgaccgacccaggcgtcatggcctttttgatcaaggagggtctcatgaccggcgacgagttgaccgtcaccggaaagaccttgggcgagaacgtcgacaagtggatggtcgagcgtggtcactcgtgggaaggacagcagatcattcgacccctcaacaacccgatcaaggagaccggtcacattcggtacgccctactggacgctgtttggagagaacaacccagactgaacctgcatcgttcgtgctctatagaatcctcaagggtaacttggctcccggtggatccgtagccaagatcactggaaaggagggactcaagttctctggaaaatgccgagcattcgaccaggagagcgactttgtcgaggccattgagagcggtagcatcaagaagggcgagaagactgtcgccgtcttgaggtacttgggccctaagggtggacccggtgagtattgttggctcttcaggggtttgattgaccgaaatatagctcacccttcatggtgtacataggtatgcccgagatgttgaagcctacttcgctcatcatgggagccggtctcggatacgacgttgcctgtctcactgacggtcgattcagcggagggtgagtacttggcaggcacgtctgaaacagtctgcgaagcgtgactgctgaccgtatcattccttcctagttcgcacggattcgtcatcggtcacgtcactcccgaagctcaggtcggaggtcccatcgccttggtccaggacggcgacatgatccacatcgatgccgaggccaactcgatctcgatggatgttaccgattccgagctcgagcgacgaaggaaggactggaaggctcctcccctcaaggtcacttcgggaaccctttacaagtacaccaagctcgtatcggatgccagtcagggttgtggtaagtttcgaccaagaagggccaagcgaagtcatcaatcgacggctaatcctgtacctcactcgttacagtcaccgacgcctagtcacctacaaaacgtctcaccgtgaacacgtgccttcttgcattcccatgagcctcacattgtagatccatgacgacgcgtaacgatcgataatatctctttcctcgatcgtgctcttacgtagaatcacgtgacatgattcatgacaacccaaaaggtggaggtcgtcctagtcgattcgggtagaagcgatactcgtaacggtcaaacgaaagcctatcgaatcaaataatatatcaatatggacgatagactcattcttgcctgaacgatcccaagatctgactcctggttcctgacgagatagatagattgcaacgaaaagcaacgatggctgaattacaaccccatatggagaaactgggtctcgtggacgagcaaccggccacgcctctgatcaagcacatcttgacgaaggctcaccttgaggctttccaagcttctcagacgcacaaggatattgtagatactgtggaggaattgaatacatctatcgtcggaatcaagctcggacaggcaggacaggcgtcagccgtgagctaaattagtctgcatctacctgctctacggtcagatccactgactagtattcatcatcggtctcttagcccgtgaagagcatactagccatgctggatgaagtcgacgagattgctaaatcaatacctccagttgataattccgcatctcgtttcggtaatcctgctttcaagacgttttatgacaaagtacaagacgtgcgtgacatatacgcgagctctcgctgttgattcatgtcgcttatagtctccttttgaccctgaccctaggtatgccccaccctgcactcaaagtacctcctgtcggtaccggaagagaacgtacccgagttgtgtcagtacttttacgaatcttggggaaaccgaacccggatagattatgggagcggaatggagctcaacttcctttgttggctgtgagtgatatcgggatcacaaggaccgactttgcggagctcaagagttgtgtttgcaacaggatttgcttgcgcaaattgggcattcttggcaaggacgacaatcagaacgtagtgttatcaatcttctggcggcaagttagctggaaccgctatcaccgctggttgcaagctgattcccaactgccgcacgctctacagatatatcgagattatgcgatatttgcagtcgacgtactggttggaacctgcagggtctcacggagtctgggggctggacgactaccacttcttgccgttcctctggggaagtgggcaactggcgagtgagtccgtacgagcacgggtttgtccatgctcattgccgctgaatcttggtttcgcagaccatcgtcacctccgacccaaagccattcatgaccctgagatccttgaagaattttcgaaagactacatgtacttacagtgtatccaatttatcaattcggtgagcctgaatcacacggcttgtctctcagaaatactcatgattcaacgcctaccgcagatcaaaaccgcatctctccggtggcattctccaatgctggacgatatctcggctgtaagccaacccaggagtcaaagtctagtacgatgtagtgtgactgaacctcgccaatccatcaggtgaaaacatgggcaaaggtcaacgagggaatgatcaagatgtacaaagccgaggttctaggcaaactaccagtcattcagcactttttgttcggcaaacttttgccggccccagatctctcgcacttgcatgcgggcgatgtcacggtcgacgaacatggccatatccacggtcaagaagaaaaggggtggagtatggattgctgtggtattcctggtgagtagctgtcgaaaatcgcccgacatagagctcgaagctgaccttgtcattccagtgccctcggcctttgcagccgctgccgccaagacggaaccttcaaaccctgccctactacagcctcggtccggcgtcaagcctataccgttcgactgaaatgagcgatgtaacgagatctcggagacatcttttgtatggaggaacactttcgactaaatgaatgatcgtatacaacccttggtcttgtcgattaacatgtggccaccacactctgtatgctatgatatatatgcttggtatgtaatcgttcctttcacgtctgattcatcgtgcgtaaagcaaaggggatcatatcatgtcgatatctaacccctgcagctcgcctcgagcttgctgatctggaacaagatttgggctagtgaccgtcgacgagtcggcagacgtcatcatcaaggacgatttacggcgaggctgcttgggcctggccgttgctgcggaagatttacgtcgatgtcgtccgttcgccttggaagatttgtcggccgcgtcgtctgcacaatccatgtgcatttcctccgcctcttcgccctcttccagatccgctagcgagggccgcttgcccaacttggcagagctagcacctgtgggttcctcatcctcgtcctcgtcttcaaaagcgtatcctagcagttcgtcgacgtgctcgtcgggactcatatcggcttgcaaacgaatcgcctgaatggcgtccttgagcagatcgatgtagttgttccgtcgttccagtttgccctgcatccgctcgatgtattcgtttgaatacttcagcaaagcgaccttgctgacccccttgttgggattgtcgtcaggaaccaaggaagactttgggagcaggcgtggtgcggaactgcctggtatcggttcgccggtctcgggatcaagagcttcagtattgatcggtggcagcaacagtcggagctcatcgaagccggctttcagggaatcccgacgcctctgttcagcagccttgtgggacgactttttggtctcgatcggaatgtttgcctcgttggctggcttgttgaccttggaagcgcgaatcaccttggccttgctcgcgtctgtagtgaaagagtggaaggtcagcttagcgattgatgatatcggtccaacaagggacgtacccgtaggtctcaacgctcgtagactagcactccagcccgcagctaatcgctcgaacctcgtctttggctcttccgcgacatcagataaagatcgcttgcctgatttcggtgtcccgcaggatgacccgctgtgtccctcctcttgctcatcaccgtccacggcaactcccgatccatccttcaaattcatagcgacgctacttcgtcgacgtccgctggttgaaagcactgtcgatcccatttgcatcaaggttgccggcgtaatgggagcgactttacccttaatgacgttcttggtcttgttgatgctttgcgagggcggtggaggtggcggcatgatcatttgtgacaagtccacgggcgaaagtgattcgcttccgatggaaccctctcctcgacctccaaattgactcgcccgcgaggacaaaggcatcgttggaggggtataagccgctacgaggggtgaagggggaaccgtacttgatccgccccgacctggcctgtgtgtcggtttcatcatcggcgaaggtctcgtgcggcctgtcgacgctctggaaggtcttagggcgggactcttgccgaccgtcgccgctctccgtctagctgccatgtgttcctggatgccaatgttacccgccgacggcattccggctcccgcttgagccgcgttgttcgtcatgtctccaggctgtcctatctcgccgttcataggcccggaggtgggttgttcttgcgagttgatcatccttgccaactcctcgaggtaagcctgggaggtcgacgaattcgatcccggtcctgaaccggaagattgtggctggtgtttccatgcatcaggttgagggagcaacgccgggctgagggtctggtccagcgtgacattgctcctgtctggcaccttcatcatcggcatgccattatattggttgttcatcccgttgatgtaaccgggggacatggccgatggcgtgctcctttctctcgcatgaccctgatttcgcgcttgctgctgtgcggacgagttgagatgattcgacctgaatcccatctggacgggatccagggctggactcgtcaagggggagaaaaagtcggaattgggtgttgggtggctggtcgacgttccgcggctcgaactctggtacccgaaaccaccgttgggttgcgggttgatcatgggcgagacgtagggtgaattttgcatgccctgctgactttgacccgaactttgacgctcttgttgattctgttgttgctgctgttgttgctgctgctgcgatctctgtatcgcgtccaactgccgctgaatgttcagttgttgttgttgcagtgcctgcaattgcgcatgctggtcgaacgagccgccgtggctcgacccactctgctgttgcgagctggacgatgtcgagtaagacaagtcccgaccgcctgctccgttcgacgaggcgttggaaccgaaatgaggagaagtgttggacgagtcgctcggctgggtgatggccggggagagaagcggggtaaagatgatctcgcccttgtgattgatggcaaatgtgccgtcctgatcttgtatcgaatgggtcatcggtaacgggctgacgagaccttcgtgtatgttggcgaggatctctgaagattgtgctatgtcgcgcgaagaggaaaccggcctggtcagcggactgaccgggcttgtcatgtcagcccgttcgccaggcacttaccaggcgtgatcaagccgttggctccactgaaacccttgcccatcatcacccctcctggtccaacactcattcctatacccatgcccatgcccatgcccatcatccgattgggcggtggaatccgatggtcaaactcgtgattgcgagcgtaccccgggtgattcgagtgcgagttgaaatgaccaggatttttcaatgatgcaaagatggcaggggattgcatgtgaatttgttccagctgtcgaaaatttacgtcgagcgggggatgcacagggcagggtgggaggttgggcgtgaggagcggcacgaaatcgggaccgggtgaagatgaaaggatcacgacgatggtaggaacagccggaccgacatcaaggtgaagggtagacgaccattagcctcgagtttcagagttccgacgactttctcaactttggacgtacctgtcgttgcaattcctgcccgacctctgcatcaagcccttctatccccatcgcattgtacgcacccgtaccaacattcacatcgtctccctcgctttgcatcgtccagtcgggtcgagcagaggtcgctgcaggttcttgcgattgcgattgcgattgtggttgcggatgcgattggatgtgtgtgttcgaggaggcgagtcgatcccgtggactgccaccgatgttcaatgtcgtccccgtcgggttcgagaaggatggaccgggtacagcgtccatcccgtacccgcccaggtcaaagtcgaaaaagtcggtcgtcgaggaagaagaacccgcggtgaattctacggacggatgatgtcgctgctgctgctgctgaccgtgctgagagccgacatgttgctgtccggatgatgaaccttgatcgtccgtgtcctgtccgttccactgatcgacccgttcttcctctccagtggggatcaatcccaacccggctgtccctgtaacagccgtctttcgtctcgtcctgtcctccccgtaccccgtcgtggtcgtcgtcgaggtgttcgatggaccttctgccgcggtggtattaccaggactgaaggcgtctaccgaacctcctctccgcctggccctgggcaggggtggattattaccctcgaggatggccggggagaggagcgcggtgagcgtgctcggatctaggaaatccatcatggtcatcggcgagagggagatttcgcctggtggtgattgagtcgtcgtcgatgacatgccagcgacttttggcgaccggcggcggcgtagagtcggtcgctctaggtggatgccgagtagactgtgtgacgttcgaagagatatgtgtgtgtgagtagtgttcgtggtggtagtgttagtgttggtgttggtgatggtggtcgtagaatgaggtttgaattgcggtcaggcccggctagcgagcgagcgctgtaggcgatcacaaattaccagcttggcttggtcccgggggggggggggtcgatggtcacggatggggcgatgtgatgatgatcgactaatccaccgagagcccggataaatccctagcgagcaagatgtaccacggagcgactacacactgtcggtaacgatccggtgcgaccgtcggatttgctaggtggtagcaagtaataacgacgatacgaaaaagtcgaggaagtgttttgcgctgtgagcttccagcctcaacgggagaagaaatatcaatctggtcgtcgagggagaaagccaagagtcggaaagcgactagcgagtagcgtcaaaaggtcgggtaacgaccgacgaagaacgaaggaaaatagtgtcactctggttgtacggacaactcgcatatggacgattacataggatggcacggacagatacaaattagatcagctccgacctgaacaacgtatgaactttttttttcgctctcttcgtttgcttttcccgtctgcttctcgcccgtcgcggatgtccagacgacctggcatgaaagaggtgtgacgcggacgatccatcatgcatgaaatgtgcggcatggcatgatcgatacctaaccgaaggagacggcatctcgacctcggaccaccatcggtcgcatccacattcactcatacttgatcgcttgtggcctggtggcgtattggctggtcgcactatcgggtctcggtggtcaaggaggtgcggaagcgcactcaggggcggtctcggtgctcggtgagtatccatgttggcaacgagctacgagcaacgcgaccaagagaggcaggctggattgtttgaatcggatcgcaggctgcatgcatggttcggggctgggctcgggcaaagacaaagctggggaacgacgagtcgagccgcgggattgtcacacacacggcagagacggagggaagctaaagatggggaaaggtgggatgggatgggatgggatggccggggggggacgcctttttgaaagccgaggcaagccagaagctagagcaacgcgcgcaggcagaagattgatcgtggaccatgaccatgcatggtcttgaggaactcgaacagaacagaccagcagtagtacaggacaagaaaatggggccgctctactgacaagtgcaaatatgtacacgctcttgctggcgatcagaagatcaacagctccatccatttcgagctccggccgtgtacgtctgctggtcccgcagtcggcgtaataacttgttccatcatctcgatcatccattcgatcatccgtacagtttcacctcctcggctcttcatggacgaccccatggcccgtagcgatggccgggggcggcgttcggtcgcttgggcggatcacagagtacgttgcgagaatagaccgaggggcaggcatcttcttgtgagctaaacggaaagtcggggtgacaatccgaatggaaggacggaaagtgagtcgcggttgagaatccgattgattggttcggaagcaaaggtgggcctgtttatcaataaaagccatttgatctcatatcgagacaccgacatgccatgacgtgtcgaaagacagatgagagaaatgatttatcactatcgaataccaaaagtgacgtttcccggtcaaccccccttcgttcgtttgatcaattggttggcaaaaagttcagtgaccattccagaggactttccatacgttacctagtctaattgaacggcacagcacaatcagattgtggccaaccaacactctactatgcctcggtcactctcctctccctttcctctgaccctcccgcctgcgctccgcctacccaccctcaacgtacccgcctcaccgcttcatacctcccacccctcgcagaaaaagttcaaacctcagaaacctttcctcctccccggtcagacccccggtcaacaacgtcaagagcgtaaacgccaggagaggatcatgctggccatcaaacgtgggaggatacctcctggtcatccgatcgatcgaacggggacgacaggccagagcttgccaggtcagagcaaagagccgggtagtgtaagaagacggtcgacagagacttcgggcgctttggaattgaagagcggatcgtctagaagagatctcgagcgagacgtggaggacaggtgggattgggacgagcgaggcgacatgcccatgcgggaccgaccgtttgggctaaaatcgagagaaaggacgtcgagcgtggattctggccgaaccttggaccgcatccccaaccggagagataagagcatcttgagcaatcgccgagcgcctttgcccttcgaggacattaccaacggcgaggaatacaagggggaagagcggtccattccccaggctggaaagccctttggtttgaaaccaaccgcagaacggtccaggctcagcaggcggaacgacagtaagtcattcgacgaaggctgcatcaatctgttcattacttccttgactgacaaaccgagcgtatcactctttcccttcaaagctgacgagactcgttatagatcgacgccaagctccaccagccagaggtccgatcgcgcagggacatcctggtcaaatcccatcatagccgaggaagatatcgatttcctatccgatctcctacctcgccgaccctccaccgagtcccacagctctcgtagacctgccccggccgacgcatacgccgccgttttgaattcgaggagaaaatcggcgtcatcgcgaaatctaccttccgggcgaggtagggagtaccattcgtccgccatcttgaggtcggcgatgcgggacaacatggattggagggtaccctcagagagcgactacgcgaggtatgatcgggacaagcgggaggctcggaagagatccgcctggatccggagacaggaagaaagaggtcaagatgacggacaggccgagcaacgaatttggacaggatcccaagggaggaccgaacgtcttgagatgcaggccgaacggcccgtcgtacggcaggatgacattacccgtccgttcaggatgcctcgaatacgaccgcccggcggctttaccaagccggagtcgaccatgagcacgacgttgagaacttcgcctgttgaaggggtcgcggatctgtcccggccagaccatcgctgggctccgacgaaaagactctcacgtccagccatggcggggatcaagcgtcttcatgccgaggaccccgtcaagtattcgagggcggcactgagcaaatcgtttggagtgagcgtcgaggcgatcgctagaatactgaagagcgatgggagatggcacaaggccgaggacaaggatgaacagggtcacgatgatggtcttgtatgatgatcaggctgatcagattgagacgacagcgttcagatgatgtaatgagtatgacgacgacggtgcagaacagacgaaagacgcgttctggcaacagatgataatgatgatgatgacggggaacgactattacagggtgttaatgtcggaatgcagatggctctaagggagaggtacaaaaaagaacggttgcatggatacacttgcttgataatgagatagattgcgtaggaaagattgtccatcgagtcgtttggtcaaagcggaccaggcgggaggctatcaaaggagcttctcttcagatcgccagcagcctggcatccttgctgggatcgaaatgaccagtggtagcacgacgggatgccaagagctgcatcgtcttgctcgtccgatcggacccctctccgagcctcaagttgggcgtcgtctttgtctggacgaggtatgagggtcgaccgaccggttcggatttgtagagcgtgtagggtttgtggttcagcgtcgactcttcgacgggcgatgacgacaaggattcgggcgcagatgtggctgatcacgcgatataggagaggtacgatcagcatgggggatcaagctatcgatcgtcggatctcgactcacgatgttttcgagcctcgaacgaattgctaggatgatcgttggtaccatccctgacgaaatcgtgtgtgccatcacaaccagacaacaacatgctgatcttgcgttccatctcgccaaagacgggttgcacttgaggtttcagcgcggtggtataacgggtggccatggaaggtccagcctcggggtgagtgaaagagtcaaacatgattgtcttcgaactgatgactcgctgaagtgacgatgagtgatgggcgatgtgtggttcgctactaatacgatcgttcaagtcgtttccaagtcgatccgagatccgagtgagtagcagtggcgaaacggttgtttacgatgtcaaagatcggcgggtaaaggcggagacgtgaggtttagatcgatctgatgcagtcgcttataggatgtcgactttgatagctatccccaatgtcgaacgtatatgatcagaccaattctctttgattgtataaagtactctgctgtgcagacctttctgacttgactcgaagtggagctccgcttttccgttacaaaggaaagacgtcgaaagctcgtgacggagtcccgcgtactctttacaggcctacagggtgacgaagggcgcgaaagggaggcaaaaacgacgagttgcggagttaaagcgcgtcggacatgttcggatcaggcgttacccggaccgagaagacaatctggttatcgacggcaggagatcgttcggtctcgtgcgacggccagaatagtcttggttgcgattagataacggtcagtaatgcaggagcagtcggtcgatcgttcatcgtttgataatgatacatgttcccaggtgtggggcggggcatacgtgtaaacagggtgggtgaagacggaaggacatgggtgtgtcgtcgaaagaacgcaagccagaaaaggggtcgtctcatgatcatgctaattgtggcgactacgaggatccgttgacctgttggagagtaaggtagattgccgaatgtcagccgccagatcccccatgtcgacgagcgtcttccgcgaacgcggacccaccttgtccttgatgagagccaaaaactgcgaatagctcgccgtcttgtcgaccctgtcctcgatcaacagactcaaggcccagttccggagagccggctcggcatcccccttgacaacgtagagatgctgccagtagggatttcgtcgcatctcgcgcgtcttggcgatgatcgcgttgacacgctgagagaaggggttctccagtacgggcagggtgtactatgcgagcgaaaagcatagtcagctggatattcgcgatcaagtctcgtcgactttgactgaccttgccacccttcaattcttgatagttgggcagatcgaacacgtccatgacgagctggggaaccgcctcctgtccgacccagaggaaaatgttctgtccgtcctcgatcaagaacaacccgtgtcgctccaatcgctcgctcgtcaggttgagcgagggagggagcacgacaccgttctcgccgacagttccagcctaccgacacgacacgaccaaacgtcaatcgaacgtacaacagccgcaagcactatctatagtcgactcacctctgctggcatgttgtgtaaagagtagaattggggatgcaggtaaggaaggagagattgggtgggcaaggtgctgagcagagcgtgagcgtatgcccgaaggtctggtgggatctgcgagctttccctgaatccgacctagatgttacgccatgaacgaggctttgtcagtatagcgctatgcagcgtcttcgatctctcgatcgactcacgtgcttgaccatggcacaagccaggagcggcatcaacttcaagttttctggtaccgtcagctgagcgctggcaccgcctccggcagccgtcattgtgtccttgtacaccttgaggatgtcgaccaccttgttgatcacggcgtccctggcgtcctcaagctttgaagacatggcccgctcgaccgccttgttggacaagagggtcatgatggcgttctggtcggccgaggcaaacacctcggacatgctcgtggtcgtggggtaagcggtcgtcatgacacggatacgacgttcaccgtaacaagtggtatggaggactgcggtttgaagcacgacaaagggctgggtgagagggtcctcgatttgcaactcgatggcgtaagactggtcgatcgggacggtaggaagcgacaagagatcggtcgatcgagtgaaaaagtttccgtggaacgccgacattcggaggcctgagaggatgcgtacggtcgtcccattagctgccggcgcacgtgatacctcctgcccgggcgactcacctcgcgaccctcgaactcgaatgacggcctcgagaccgataggactggcgagcacggttccgaattcggtagcaaacttgatggcgtcttctgatcgggtagcgttgaatcctgggtaatagtagacctggccaccagtgtacctcggcagacacctcagactggccacatcggtgtaggatgcgctaaagaggaacatgtcgacggtgacctggtttcgcgcgcactcgatggaaaaggtcttgtagaatgaggcggcagcctggaggagcgacgattcctgcaaagcggtccagcgtttcgttggcacgagttcaggagaaaggaacattacttgaaaatccgactgaccttgctggttcccaacaacttggggtcatccctagccttcaaagcaccctcaccgagagtcggcagagtagccgtcaaggtgatgatcttgcctccgatcgtgccctatatcatcatcacacgtcgaccgtcagcccgttgaatgccggcgagtatacgcgctgattgtggtactcacgatcagcttgtgagccgtctgcatggcaggtcccaatgcactgccggtcgtcgcgctctccttgaacatgtcgctcaacctgcccaggacgctctcgatggccggacgggcttccgtcaggttgaccaagaggtcggtcggtttagggaggtagacgtcgtcgatatcagagacgacgagcatcgacggttccgattctccagcctagaattgcgtcgtcggtcgcgatcatgcagggtcgagtcaggaaatcggtcctggccgccaatcgaacgacgacgacgcgaggtcgtgacggaattccatatgggactcacgggcaacgaaaagaagtgcatggcgtccgagacggcgaggatcccgacctttgtccgttgatccgaattgggaatccgatcgagggtctccaagatggtccgtgcggccgtagcgaccatgcctgtgaggtgcaagatgggtcaatcagcggtgtcgtgggaataccgtggtgcgccatgccaggccggcactcacctgactggacggcgtgctgggacacgtcgatgacgaacacgtaaacgggcggctgagggggtcggatctgcgacgacgaggggggggtcaatttcgcggttcattcacggccagactgtcgaccaggggcccagaaaccccgcgactccgacgactccgactcaccatgtactcctgaggtgcgacgaattcgacgaccccactgttcagctcggccctcccccacctatccgccggctggttcgtctggttgttccaatcaaacagctggggtacctcgttgctcaagttgcacatgcaacacttccaccgcgctccgccctcgataaaggtgacgtaggggttgatgtaagatcgacatcgtcggcacctggcgatgaccgtgtccgagacgacggggacgggttcctacgtgggttcgcacgcgcgcgcgcattgcagatagagacaggggaagggggggcacgagtcgtcagcctcgccgaagatgatgggaacgaacggcctgctctgtttttgtcgcgcatcgcgctccactcacgtctccctccttgatactcctgtaaggtgtgaggatcagggccaacgggatcttggtcttggtcaacaagctggccgtggtcgggatagcgttgatcgtggaacgttgataactatgatgagcgttggctgcggggtcgttcgagatgcatgctccgggtggcaagagcggagctgggggatcacgagcgaggtccgggaccgagggttgcaagccgatcaggttgaggttgatcaacgggtgagattgaccgggttgctgatgttgttgttgatgacccatcatgggttgcggttgacctccttgttgttgtccgtacccggcgttcccaccgttcatacccatgttgttaaactggttgaccatgttgcccatcatccctgcgccttgttgctgctgatgctgctgctgattggggtcgaccccaccggcgaccgaaaaggccttttggtctccatacccagggttggccggggcaaagtaaccccctgtagcaggtccagcccccgcccccccccccccccccccccccccccgctcacagggaagccgccgctaaagaacaagccgccgcccactatcaaaagatgcacgctgcgggcaagacggaccagttcaagaaggatatggagaggctcgccgaggtcaaacgacgtagggagcgagaggccgcagagaggaaagccaaggaagacggtgagtcgacgcgagcgcgcatcgtcctctcggtcacccgggtcggaagcaggaagcaggaagcaggaagctgatcatgaatgaaactgcccgggtctgtcggtgttggggttgtcgtcgacggtagaggccaagaaggaggccgaggataagcgtcaagcgaggttggcagggaaacgatagaagcactcccccaggcgtcccggtcgtcgagcgtgccccgggtgtggtctcgtcggtttgaacgtgtaccctttatgatatgcacaacgttcatcagacccggtgagagtgtattacagacggcagcaggttaatgcaagacgaggtacgagcgagcggaacatgcaatgatatccagcagtcaccatcgcagaacggaacaagcttgaatagaggtccggcaggtcgactacgtccccgctcgagatcgacatcattccgaggtctcgcttgtgggtcgtggcatgggtgagcgagatgtcgacctatcatcggtttcagtggatctcgacctggatcgcgctttccacaagaccgacgaacagcggaattatcccgaggcgaaggggtgtcctctgcgttttcctaaggggtcaaggcaggtgccatcgagattatacggggggtccgagactcggttcaagaattgctcgacgagcaaagcgaagcgatcttaaagattggtgcataactccactttgaagatagagtagtaagcgcagcagccacccctgggtctgccgcgtcgaacgagtttctccatccccaccatgttggtgttcatttctctggtacaagtacagcaacccgacgtcagtctcgatcgaatgcagacgatctcgtcggagctcagtccgtgacataagaggtggatagcatggacatcaactcgacggtcgatctttgtgcaagacgaaagacgttgccgacttttcctacatgcgggggtggttatttcggatatgcccgatcaactcatgcgactcacgttgttgtcggcatgtcattcgtggtatggcacgatgacaaacttcccaaagttgtctttctccgcacatgtatactttgtgactgtatatagactcgaaccgagcaagggatttgttgtgaccatcgacacggactatcacctgtttcgcacacgatcatcgagctagcgacccgtacgtagagctggtgccgtgcctatgcgaaaggttcgctgacatcatcttcaacagcctcgacattgttgcccgcaacccaaccagggaaccgcacggtgcctcggtcaaatactagagagattccgagttgcagtccttacagatttcagcatccacctgttggaagatgaccacgtcaaacgagctgacgttggacacgtcgtgagtgaccctcgcgcaaccccatcctgaccacctacccaacctgacccttttgctatcaggatcctgatcgtcggaggagccggtacgataggcagtagcacggcacttcacctcctccgaagaggctaccgccgtctcaagcttatcgatacctaccccttccccgccagcgggtacggcaactctcagtcggcaggaggatccgacctgaacaagcatgtcggattcgctacttctggtgtgatgggcgaattggcacaggagacgatgaacgcgtggaggcaggatccggtgttcagtccgtattaccacgaggtcggagaggtgagcgcgcgggtgtggtcatccaggaccgtgctatcgcttccttactgaaagcaaaccgacttgcaactcgtgcagctcgtcctggcatccaaccaggagacgatcgacgagcttcgtcaggaatacgaacatcactctcggacctcagcagacccgatcgaatggcttgccgatgcaccttccatcgttcgcagagcgcctcatctcaagccagagaagatcgagggatggaaagggaattacctccctagagctggttgggcagcggctatggacgccgtcgacagtgtaggaaaagagatcgacaggtttggcggggtcgagatggtctttggaacgtaagccacaatatccggtcccctgtccggtcgaggagggaacgcgtatagctgacctgttcaatccggagcgtagctcggcaggatctttcaaacgacccatcgtggacgagagcaccggaaaatgtatcggggtggagaccaaggatggggttcgacaccttgccgagagggtgatcatggctacaggagcatggacacctagcttggtcgatttaaaggggcaatgcgtttccaaggtggggctcccttgtcatgcatcggttgagggcagagaggtagtgcatcaggctgatcttggggtttatgcgggaaacagtgctggatcgtggctcatctcgaattgacagagcaagaggccaaaaggtacaaggggatcccagttgtgtacaacggagaagtcgtacgtcgccctcccgacctggtctttgctcatccctggtacatctgaattttggtcactgacccacgttcccgaatacagggattcctctttgaaccacgtcacgttcccaaccccttgacaggggaactacgttggatcatcaaattgtgcgacgagttccctgggtacacccggaacctccccatccgaccctttggcgccgagaaaaagatcgaggtctcggtgccccggtcccactcggatcatccgtcggataccgttcctgacgaggggatgaagaggttgagacgggtcgtcgaggtcatgctccccgaattcaaggatcgcgagtttgtcaagagttattgttgttggtgtacaggtatgaacctcctgtcgacagcgcgaggtttggtcagggagagactgatcctcctgaaaatggtagataccgacgatgcgcaatggttattctgcgaacatccgacgtgtccggggctttacctagctacgggagatagcggacactcgtttacctcgttgcctatcgttggtggtcaagtcgctgatctgctcgaaggcaaggtgagtctagcctcgccgtgggcgtgccgtcaaagtcgcgtatcgtcatactgaatttgatacgacgtttggttcatagatgtcgaccgagcggatggaaaagctcggctggagaccagggaggggtgatccagaacgtaccggtcgaggtggtcctctggccaaggatctgagagacctaccaggttgggctcacggcgatgacccaaaggaggtatagttgacgcaacgcgtagacaatgatatgtacatgcttcggggcacatctcgacatgcctttgcttcgattatcatgtcatcccgagacatagtactcaaattgagtaattacaatcacaatggcgatgacgatgactatgcaacgtgaggtgactgtttaggcgaacaaaaggcaaggttgacttttcaaacgaattggcgcgcgcgagtagtctcggctcaaatcgattacaaaacgaatacgcgcacttttgctattgttcccgcgtttcatatgggtccagcttgttcagaccttttgtctttgtgttcatcgcatatctcgacattgttcctgtacttggagggtatatgtacatatgttacacaatcacagtgctcatcatgttcacatccagcctccccgacccattttccgcgtcagtatatcaaaaccacacgtcttcttgccatgtcaacgtcgacctattccgatctcgacgccgcggcgttctaccaggcagcgttcgacgacatcgactcgcctcgcctccctctactcaagaaatctccccgaacgcgaggactcgatctgaaaatgtcgcagcaaccggtgatgatccaggtcaaacctctcaatctgaagcgaaaggaagcggggtatcaacgactgtcggtcaagcctagtgagtccgctaactgaggcatccgcaacgccgtgcgctgacgaacacaccttgtaggtgtcctaggaggatccagccccgatgcggtatcaactaaacaaacaagcccatgcctgacctcttccgagagcagcgacgaaccgagtagcttcctctctttgggtccgcagagatcgccctacagcacgaccccgctttcgctcagcctcaacgccgtcggacaacactttctcgacatgacactctcttccgacgggcgtgctccgactctatcgcccatcgacgacgttcccttcgtgccgacatcttccagtaaaccgatccggccccgtcgcccttccgcctcccggctcgattccccgctcaacatctcccggttccactcctgcgacgacttccgacccggtctcagtccacccaccaccccggggttcccctccggatcccgcctgccgaccccacgtcccatgtcttcccctctcctccctcgccgtcgatccgagccggaccaaacagtcgacgctaccgttaccatcactatccccctaaaggcatcagagacccttggggcgatcaaccgggacgagacgtttcaggatgaacgaccgatgactcctttgagagcgggagcgaaggcgttgcgtctattaggtggactggaagacgcggcgatgatcgtcaagaaagggaaggtcgagaagaggagaaaggagtacggattgatcgggtgagttgtcgtgtctgggagggtcgatataaggttggacaacctttgtgctgatcgagttttggttatctgtgcggtcgtgcgtcacagagcaaactccaacgacaatgagagcatgtttcaaatggcgtccctcatgagcaagagccgcagagtcacgccgggtcctattaccgaacccgcccaaatcgatcgggaatccgttcttcaatcaaatgaaaaagtcattggcgtccttccgatgtcgcgcaaggtcgaccgctctcctctatctcgttgtccttcgcccgacacccaatccgagcgttcttttgattactatgaaagtagacaaagcagcgagtcactcttggacgacgtcgttatcgtcggacacgatgggaatcgttcgagcggagaacacgatcgggacaggtaccaggtcgcccggacggtcaacaatgtcccaaggaaacggatcgcctcatcggacatggccttcttgacgtcggatccgtacgctcggactcgtggaccttcccctgccatcacaacgacgaaccaacccaaacgtcgaccaccccctctcgcgctcaccttgtcaaacggcaagacgacttcgatgccagatcggatcccgcaaactcggctcgctcccgaccagatcagacaaaacgacatgatcagccggcccccagctcggatcagcagtttgccttgcacgcccttcactcggcctcgggtcgccccggccccgcctcaaggcggacgatctagctcggactcgatggtccgcccgctgctcgacaaggatctcccggtcgacgtctcggtcgcgtcggaacccaacgaaccgatcccgattccgcaagacccccatcgtaaaggccggtcgttcttcatcgaagacgaatcgctaactcaggggtcgttcggcatgtcgcttgccaagaagatcacgttgaagggaatgggagagagttggaaaagagccgttgcccacagaatttgattcggaagctcgaagattgatcgatatcgataagcgattctccaattatgtcctgacgattgcatgtagtacctagctatgctataatataccctggttctttgcgtcgactttaggtcggcaaaaatcttgccctgaatgtacgcccaagatgagtgctatccctgcatccgatcccagacctggactcacgcatcgccgtacatctcctcggtcgactttttgaacaccatgatcccggcaaagacggccgagacgaacaccaacgagctgaacgtcgtccagaacaggaaccacatcgacgcgggccatccgagaagttcctgaaactgcgtgcagtccgagcaattcatcttgtcaaaaaaccgctcgtccgtatagtcccaaacgacatagaacaagtgcatgacgcctgaagtttcctgttatcagtatcatgctgggtcaaacgatgtgaaggttcggacgacttgccattcaacaaaactgtacgaggatcaaaactatcggtttatcacgtgcgacaagcgcgccctctccgtgctactcaccgaaataccgcagagcgttcccgtggtccccgaaccacagtccaatcatgataccctccatagtagcgatactcaagaaagctctgtagcatccaaactctggtcagcttgcttttcaacggccattcagcacaacacgacgaacatgaacgagtccaccctgaccgcgggaacgagcagaccgatccctaggataaaggaagcgatcttgctcgctacgatatcgactgccgtgggcggttttcaagaatcagctgatgccgtctcgtatgatcgatcagtgtgatactgacaagccgcaaactaaaagtgatatgcccaaatgaccatcagtgttatcagattaacctccgggaggtcacctcgttcgatgacccttctcgactggactgacgataaaaaggaagcctacgaccgagcttccaaagtagcctgcgcccaacgtcgccgcggctttccaactccagaatgcctattcccccaagtgagtcaaagtatgaaagtccaactctcgatcagctcgatccgatacgatccggccagatccagcatcccggaatacttgagtacccctaggaatgggaggacgactgacctgagctggtgttcggaacatggcctcgtgtgggttagtaggcggtcgaggtgtagcacggagtaacctgtcgatcttggtctccccgcctaggttcggatcctaacgcgatgagtcccggtcaggaagaagacgatggggagtagcatcgagggagcgtagggggtagggatagcgagagggaatatgggaaggaatgtcagcgcttgatccttgcgctgtcgttcttttcgggaccgcttgcttcgagttgtggggaagaggattgctcaacggggccgacttacaatacagatcgagatgatctctcctccgacgatcagcccgacgatcatatgccacatttcatgcacagctaccgtgaacaactagaacgacgtaatcgttgaccaccgggacagtgttgatgatgatgacgaagcggagcaggtcgggtcagctcgccaagctcggtctcgaggccgatcacgagcgtgggcaaggagaagcacaacgatggggtcatccagcgaggagaagggggtggagggtcgtactgactttgaggccggctatcaagtcccgtaggatgggcatatgccacaagaaaaagatgccaaagaacatctgatgacctcgcaggaagacgtgccgatgaacagatagagaccaagagtggcataaatcagcgttttgagaaggcacagtcagggcaccccggtcctccagggggaaaaggtaggtagagggctcgactcacgatacaagctgcaatgatcgtatacgtctctacagtcccgccaaatgatgatcagctgagcggtcggtccttttcgcaaggaatagtaatcggtgaacgtgaggcttacggaaagagtttggtcttgaactcgcccgcttgacgagttcgtgcagtatcccttcatctccatatatcgatgctgctagtattgatgaagatggcgtattcgtgctcgtcgtcgcctggagtgtgacagtttggttcatcttcgaaaagtccatcttcctacagagaatgtttggtgatgaattataggtcgagggctgtttaaacctggccgtccgatcgaccgagctttatagtttgtcgacgatgtgacgtcgatacgcgatacgaatcctttgaccggactttaggctctgatgaaaggaaggctgggtgttttcaaggtgggcaacgcagtccttggggtcggggtttgtgctgggtcgaacggtgttcagcaatgcgaatgacaagataatcgagatatgctactctgttgattgtatgttgattgaatctctcgccctgattccaggtcgttgccatgttttcgtgttgttgtgatttgatcgaaaacgggaaaataaagatgaaacacggagaaattggaatgataaccaacacaaggtcatcacgtttgattcgtcaagacctcccgagagagtcagtcagcatgttgcgaatggacagtcacgaaactaaaggctggtagaataccaagtcataaattcgagcccacatctgatagagtctgatggtcgtatctctaccacatttctcggctgtcatcgcgcaatgatgatgatatgatgacgatgtgatctggtttgcgagccccgactttgacgtcgcgtcggtgcggatcaccaaaacatactcttcaacagtaccacctcttagtcatgacgcactaccctcatccctgacatccactttctctataggacaacagtttccagttctagatctctagtcgactatgatgaattcgcccctctttaacccggttctcacgtgattttcttccgaattttcggatgcaaaacctcgaaattcgactcggcaaagggtaacaagtcgttcaaagtcgagcatgatcatgtatcaaagttgcaagtccaaggttgtattatagaattatagagccattccaggaacacctcgccagctcgttaacatcggagaatcagcctggcaatcatgtcgggacatagtcatcgccctacgttgaaacaggcaagtcgaaccgacctttgcctctctcctcctccttttgccctaacctgttactccccctcgtccgcctctttgcaaacaacgacacagaaaaacaaaaacttcaaatcccgtcatgccaccaaatcatccttgaaaaacgccgccaaggggaaaatcgacaatgcttccccggccacatcctcggcagcttcgactcaccgtgcgaaagccgcagcggagaagaagaacaggatgaaccatcgagctcagatccgttcgacccatcataaagccataggacaggattctaaattcttctccacagtctccggagggaaagctgtaccgaggatcgtatccgtcatccccctccactcggcagtcaggtgtgaggatttcggaaagagtttcgtagaagtcctcgggatggccgatgaggaaaaagaacgcgtggaaaagagcttgtccgatcgaggtagctggataatgaggtcagtttgcggtgggatgtcggctggtacaatgatgagctcataacgaatcatctgtccctaattcgctctgcatctctttctcgccgacagtgccccgaaattcaagacctcgctccaactcgtacacctccctcccctctccctgtacgccactctcgacgccgccctggcctcggactatgtcatcctcctcctctcctctgaacacgaagtcacggaagagggcgagaggatcttgaggtgtctccagagcgtcatcgggggtggtgggggacaggccgaggtcattgcttgcgtgcacgtgagtacgggaggacggtcgtgtcaaagggtcaggagctgacgaggcattcgattatgtgctctgttattttttgtggcctttctcgacagtctcctcgtcgacaaccgatgtccccgcaggatcgaccgggagtactcaaatccctgctatcctttacaaactactttttccctagcgtcaacaaggtccacgtcgtgcccacccgcccggacgcttcgtccagcgacgccaacaacctcgccaggtccgtcctcgagggcgttcctacgggagcgagtagcatcagtatcgagcgtggaggtgccgggatcaagggacggggtagggatggaaggggttggatggtcgccgagacgggcgatgcgaggcaaaacggtgaagacacgcaggcattacggtacgaactcgaaggcgagggtgcggatcgcgggacgttgagcgtgacggggacgatccgaggagcgaggttgagcgcggataggttggtccatatccccggttggggcgattaccagctcgagtcgatcgtcgcctcgagcgttccccgcgcggctcatcgtcaacacgccaagagcatgatgaccgacgacgaggccgccaacggtggaatcctcagcgcacctacagagcaggcggacgacctgacggcgttgaacgaagtcgacaccctgggtaacgaacagacctggcccacagaggaagagatggcagagggcgaggcagccatgcgggatgctgagcggaaaccatcgagggtcaagagggtgcccaagggtacgagcgcttaccaggccgcttggatcttggatgacgaggatgacaacgacgtggtcgaggatggcaatgtcgatgacgacgacggcgtcatgcaggaggacggggatgatctcgacgagggcgatctcggggtcgaagccgggtttggacgttcggcccgcgtggacgaggatgacgaggaagagaccgaagaggtcgagctggacgagaggcccgacgaggaagaggaactcgacgatgccgaagaagaaagacagtaagtcgcccggcccggcctgttgtcgaccatgcccgtaaccgacctgaccagaccccctcggccacgtgatcagactccaagctttccgaaaagaacgcaacaaggaggacgctgaagatttgcatttccccgacgaaaaggatacccctcgaaacggactcgctcagacccgtttccagcggtatcgagggctcaagagtttcaggacctctccctgggactcgtacgaggatttgccgctcgactacgccaagatcttccaattcgaagactatgagcggactcgaagacgggcggaagaggccggaagggaagagggagtcgaggtcgggactagggtgcagttgaggatcaaggacgtgccccgtgcgttggtcgaggcgagggaccctcgacaccctttggtcgtctacggtctgttgcagcacgaacacaagcaatcggtcttgcactttgccgtccagcgaaataccgagtatgaagcgccggtcagggccaaggtgggtcgcatcgtcccgcgaaacggtgccatatcagctgatcaccatgtccccgacccgatggtcacgtaggatcccctcgtcctctgcgtcggacctcgacgataccgaatcaacccgctctactcgcaacacacccgaggaggtggcaagggcgtcaacaatgtgcacaagtcggagcgatacttgcggcacgggaccgccgtcgtggccacgacgtatggtcccgtcgttttcggtaaacagtcgtgtttgctcttgagagagtccgaggatctcgaatgtgagtcagggcgatgcacgcttgcgtgctcgtggggattcaagctgacgagcgataccccggggggcgcgtgtgcgtgtgtgtgtgtgtgattaaaaaggtcctcatctggtcgccatgggatcgttcatgagcgccgatccgacgaggatcatcgccaagcgaatcatattgacgggacatccgttcaaggttcaccgcaagacggcgaccgtgcgatacatgtttttcaaccgaggtcagtctggcgatatcggagcgattcgagagtccacgttcatgtgctgatcgtcgtcgtcgtcctcgtatcgttatgtcagacgatatcgaatactttgcgcctatcgagttgcacaccaagtatggacgaaccggtcatatcaaaggtgagtgtggacgaggcgaactttgaagacacacggtaccacgggactgatgcgctggctggactacagaacctcttggtacgcatggatacttcaaggccatctttgatcaacctatccagcagatggataccgtctggtacgtccttgccgaatcggtcgatcgtccgatatcaacgaacgaagtgctttatgctgactggattgaaaccacccctcgacccggcttgttacccatcaaatagcatgtcattgtacaagcgtcaatatcccaagcaggtcgagtactttacgccaccacccgcgggcaagcatgtgggcgaggttgaagaggttgcgaatgaggatgacgagatggatatcgagtgatgtggtcagggcgtggttgtagtcgtcattgttgtaaagaaatccgacgatacggcgatgacatatacatgtgtatatcattgtggtctgtctgtgttgtatggccagtaccctagtggtctgattttgaaacgcgcttgttccaatttgaagcgcataatcaaccgaaaccagagttgcgagagttgagagttgatcatattcatgggtcttgacattccaaaactactgactgtagcaccatctacctgccatcatcttccatcatccctaggtcaatctacaacatccggatcacgtctcagtagcatccattcgagcttggaaacaattgacgacacgagctaggtaacgccccgcaccgttctggacaccgccttggcacctttgcacacgctcttcagctagcatcaaaatcgaaaccgatccttgactaaaggacagcctattcgagaatcagctcgaccgcaaatctcctcaccgatcgtcgacccgactcgcatcgcatcccaacatcacacctgcatagcctttgtgaatccagcgaaaggatcacgctgtcaaccgaagcagctcaaaaaagtcgacctaccctctcgtccgctcggctctccacctgcccatcatgaacccgtcgtataccgtccccgccatgccatcacacccacaaggtggccctcatgccctatccacccgtcaatacttgacagacctatcgacctcgctcttcagctttgtactcccgctcttacccacagcagaggaactggcgaccaaggaggaagtcagagtcttgatcgagaggttgatcaagacgatcgaaccgagttcgaggttggccagtttcgggagcagttgtaacagctttgggttgaggaatagcggtgagtttcgattcggtcggacgagccctgaatagagagatgtttcctatcccctttccgtcggtcccgcaccatcgaaaaaattacgtctcgagcgttttgaaatctaacccgaactttcctgtcgatagatatggacctggtatgcctgatcgataacaaggaagcagctctgcacgcatcagatttggtagcgatgatcggggacctattagaacgaggtgagccctgctcgaaaattcccctcatcgccgggtagacggcgtacctggatgaacggccaaactgacgttcgtttacacgtacaaccaacgccatgccttttcccaccgaatctcacgatcccggttgacgatcgtgtagagaccaactttgaagtgaaaccgttgccgaaagcgaggatcccgatcatcaagttgaccctccaaccttctcctggtctcccctacggtaagcatggccaggccaggtctcgcctgcttctaatctggatcaggcaattgacaacccctcactcgtgatccgatccaccggaattcacgatcgataggcatcgcatgcgatatcgggttcgagaaccgactggcattggagaacacgagactgctcttgacgtacgcgacgatcgacccggcgaggatcaggacgttggtcctcttccgtatgtcgacattcatcctcgaacacgaacgagtggacgtacagctgatgagaatttgatgtgtgctttcgacctggtctcgtagtgaaagtttggagtaaacgaagaaagatcaattcgccctacaaggggacgctctcgtcttgtaagtatgatttcacaggggtcgcattctcctccaggttcactcatctgtcgggatgtcatgtcgagcagatggctacaccttgatggtcatcttttacctcgtacacgtcaagaaccctccggtactacccaacttgcagcggatagcgcctttacgaccgatgaccaaggtgagtcgtcccgttaccctgtcgcccgtcattactcgttgctgataccgagaccattgcgctcattcgcaggaggagatgacgctcgaaggcagggacgtttggttctttgacgacaccgagacgttgcgaaaggaatggagttccgccaactttgagagcgtgggcgaactgtgagctcggagcgttctggcttgcgaaggggtgttggctgattctcctcggccccatcagtcttatcgactttttccgatacttttcgcacgatttccagtacaacaacacggtcatctcgattcgagcgggacacttgaccaaggagagtaaagggtggatgaacgatgtgagtcgagatcatgatcgggttgatcagagggcgagtcgggctgacggttcatgcctgtgtgtgcagattgatgtcggcggtctcaacgagaatgcgagggataggaataggttgtgcatcgaggtgagtttgaacgcgtgtcttctatcggcggcgaggactctactaaaggcgagacacgttttcaggacccatttgagacgccctacaacgtcgcgaggaccgtgaccaaagatgggctgtacacggtgagtcgcagcgagatgccggatgaggcatgagacgggcgcacagtcgaatctgacaacttttgtttgccagattcgtggcgaatttatgcgtgcgacaagggtgagttacgcacggcggacgatctgacccagccgcgatactcatcaaccgcctcctcgctcgtcgttttacagatcttgacggctcgtcccgaacgtgcagtcttggccttggccgagctgtgtatcgaacgtgaagacgaactcgcgcgtgctcctcgatcatcatcaccggctcctcgttccttgtcgggaccccgggggtacggatccgccggctggaagagcaacaacatgacgatcgggccgttcgataggatgtcgcagacgatgaacgggatgatgcccggtggcgctagtggtagcggagagatggacgactttggtcgacgatcgtactcggcacaaggtaccgctcgacgcggtcgacgttcagatgtcggaggcgattcgggcccttattcggcgcaggacgcgtggcattcgaaccagggtatgggaggggatcctggtcgataccctggaggagatgggttccgtggacgcgatatgggcggtcgtcacgatttgggcgggtacggggacgaggcgccacactcgcgagccgggtcatttagcgagggtgttggtggtggtatgggtcacatggccgccgggtcggcctccgcgcccatctcaccggtgaagtcgtcgagtggtctacacaacgaatccagaaactacagcggcacgtggagcacgggcccgtctccacgacaagcaccaagaggactgccaagcgtcggcgtccccaggatgtccgggaatgctggccaaggtggtcgtcgaccgtctgaatcgacaggacgacgacagggacgaggtccatcgtacggcgcagagtttggcaacggaaccggtaacgggtacggcgcctctgggtctgggtactctcagccacaagcgtcgtcacagcaagtcccgggtaaacgagcctattcggtcggagccgcgggaccgttcccgccgacggtgacccctggcaatgtttctcctagcgagcttgccatgatcaacgggtcaggcgcggcgtttcaaccgttcaatagccctgtgggccctgtcaacccgctgcacaacagcaacaacaacaacaacaaccccgcgaccgatcagtatctctccccgtccaatttgaggacgccggaaaacgactcgctcaacgcgttgcccacgatgagcccattcccggcgtatcatagcaatcaaccggtcccgcagtcggtcgcgccagacgttgcaaacgacaaggaggatttcaaggcgcttgacgaattgaccagtcgggtcgggcaggtcgcgctcgggttggacgacgaggaactcaagtccgattcgaacggccagtcgagcgagtcgaggacgggcaaggcatagcgctcggggtacccggtggctctccgtctccttgctctctccgtcgcgttctctctctctttttacgaaattacgaacatccgtctctccaggttgtcgatcccttcgtctctgtgccgccacactggcgaacactccgcatccacacatgcacacgtttacaaacccgcgtacgcatatccgttgtaaaacactctcgcctgcgcacgtcgcctggctcccgcggcacccgcatcgcatatggcatcgcatcgttgtcgccatcccgtctcgaggacctacctggtctggctcgtcttttgagaggttgtttaacagaccgcctgctgggctgactgaatgtccttgtcaagggacgagtagtcgagtggcatcatgacacattattgcatatatcatccatccgactcaccttggccctttgtcatttgcgtcgttgcgtgtgtcgtcatccacctccaggttgcgcgtgaacccaagttcaaagtgtggtagaggtcgatagatcattcaaccattcatgtcattcattcatctagtcgattcaaagtacaaacgattggtcgtccacaagtacttattaaaactagctaccagtccttatcgatttcaaccatgccgggacccaatttgaaagatgtacagagcgtcagcggtgcgtcacgaactaccatcccgaacttttgtcgccccaaagatctcatctcatccataaactctggcttatactactgacgcacgcccgcctgtagaattcgactcgatcatcaaaggcttgccagctacccaggcctgtttcgtggatttcacagcgacgtggtgtccgccttgtgagtcggaggcacggcaatttggatgaggcacttcgattgacaccctggggatggtgtacgtcacaggcaagatgatcgggcccatctttgagaaacacgctgggacgacacctcatgctcaattcttggcgagtctagttcaggggcaaccaagtcgagacttcatctctgactaccgatacgtcgcctctcgatacgttatagaaagtcgatgtcgatcggttgcaggccgtggcgcagaggtacgggatccgagcgatgcctaccttcatcgtcatcaaaggtggcaacaaggtcggcgaggtgagcataccgtccagcatcgtagcaacgtttggcatgatgggacgaatcggacctgatcgaccgacgtgctgtggtctccacctcgtgattcgtagatgatgggtgccaaccccgctgggctggccaatctgatcaagacgcacgctggatcaccacccccggctgggaccaagtcggccggaggatcatcttctaccacccctgccgaacccggtgtggtgagtcccgcgcgcatcttacctatccctctccccctctccgcatgggtcaatgtatgctcatcgagtcggctcccgtatgtgcgagaataggaatccctcttgccccaggtacacaccgcccagttgacctgcctgaacgagagctcgggacacgggatcaagagtatcatcgggagtggagcaggacccaagggtagctcgtacctcgagagcgagagcgatcccgagctactcatctttttgcccgtaagttggcccttgtggcgacgatccggttcagaagctgatcccgtcgatcacgctgctcgtctcccctcggcattggcgatgatcagttcaaccaacccgtcaagatcaaatccatctcctttttctccggaatctcacccacccaaggtcccaagaccgtccagctgttcatcaatcaacctcagttcgatttcgccgatgccgattcccacgaaccgacccaggaattgacattgaccgaggacgacgtcaaggggaacaggatcgatctgaggtttgtcaggttccagaacgtcaacagtctgcacgtgagtctacgcagagtgaagcgtcgatgtgattcaggctaggtcgaatgtcaggctaaatgggacgaaataccgtcggtccatagatcctcgtcaaggataatcagggggacgaggagacgacgaggatcgattcgtttgacgtgtacggaagtggtaggtgcgacggaaacgacgagcgcgaggaaacctagccatgtgctaatcaatcattggtctctgtctgtcatcagcggtacatgcgacgagccgggacaagatccaggccatgccggagcattagaacagccgtcgtcgtcgtcgggaggtgggatggacctgatgaccgcgctcgtgctcgcgcccgcggtcttgtggctgctcgggttggtgtacgatcggatgaccaggtcgtaggcaaagccgtcatccgcctgtctcgctatgtgggatgtacatcttgcgttattctttgaatcgtcgccgtcgtcgtcattattcatgtggtcatgttcgagtttgacatggacgcggaggcaaatctcaaagttccccctcccccggtccaaagagtcgatgatggcaatggacatggtgtagggtcatgatattgatatgtactactctattggaccgttcttgccaagatcaacgacagccctgtagcttgaacaggacaggctcagagaaaaagctaaaaaagtctctcggacgactcccgatgaccccatctaaacaaccggcataaggggggaccatcgagaacaggacatttctcgccatcatgtccgcccaggacgacgatcaggtaccgccattagaaatcgtcgtcgagattgccttgcccatcgagaacgcctccagtcccacggacagcgacgacccagtagttgcagcagccaacgctctactcgaggcccgtcgggcgaacgtcgtagaaagcttggccatcatcaacgctaggctggattcagcccgagaggacgctagacttcctttgttaacccacacggagacggtacccacgagaggaggggagacggacaggacgaatcaggaaacggcgggagttccagtgcacaacacggacgacgcttcgacatcgacgtcggtccagccgatcttgtcgtccatacgggacttgcgttcggccctccacgaaagggtcttgaacctcggccacgaagtcgagcgactccgagcgagagcagccgccgtcgaaagaggtttcgcggataacagacgacagaggatgatcgagagtcgaatgccgggagggacgctggattccccctgggatcgagatgagaccgaattggaagcgggaggatcagagcaaggggatccggggacgacgtggtccatgtccgcactggtcaataggttctcggcgtcacaaccttcagatatgacgcgggatcgagaagagggcaagtacgagattgtcaaaggttcaggcagctcagagatcgaggggagcaaggaggagagacgtcagaagcggttacatcaggtcaaagtggaaagcgtgagtataggtctggcagtgacctcgttttggatcatcttcccggctgaatgacctcgacgtgacagacacggctcgagtcaaaagcctccctggacgcactccgaaggagagtcggcaacctgtcgacccgaccatccgaggtgccgtccagcgaaacgacaccggccgtatccgccataagcacgcccgtcgatcgacccgtactccaggatattctttcccgaaacaggacgtttgccatcccgccagcatccggatcagcagatcggagcttgactacccgtggactacgagttcaaaatgcacaatccagtagtactgccaacgaagagaccacagccgagatcaacaggagatatcgaaacgccttgatgaaccggccggtacctcctgccaatatcggacctcgacctccgaccgtcgacggccggatctttaccaataattttaccgaggagatggaacagaacatcactcgacttcaacggatggtccaggacgctcgcgtgttgcaagaccgtcaacgagccgccagcgagaatatcgaatcgacgacaggggaagccgccctagatcgagcgagggaaaacgtacaggaacttcgcacgttgcatacaatgttggaaaacctctacacgcggttcgatgccgcacgctcgagcttggtaccgacttctcgattgagggccacgccaccggctgtccccgcagcatcgacgacggcggcggcggtatcgagaccccgttcgcgaacggctcgaccgaccctggcgagacgtccgagtccaccctttctccgatcatcggctcatccctactttcgacccaggattgggatcgagcctatcgctgccgtcctcaatatcgacaatctcaacagcttcgagctacatttcgatggcaacgtcgtattccgacccatcgcgaggagaacgctcgaacccgaattggtcgcacgatgcttgtcaatgttaccaggcggtcgagaggatacgccttcgagatggatgcggttgatcggggatacgacgtcgaggccgagacgggccgaggcgtggggaggttattggatccgttgggtatcggaagaactgttcgaaatagagcgaccgaggcagagacgactcgatacggacacgttgcccaagatcatcgcctttgacatttccgtcaccccgcccgaagacgacgcctgggtcaggagcgacgagagcgaattttacacccagaggacccggttgagacgtcacatcggaccgtggatacactcgcgtatccgaatagccccatacgagacggacccagctgattctccatggggcacgtcggcacacgttcgacaagcgatccgtaccgtgggtcgggtacgctcgggagactttgttcgcttcaaattggacgaacgggtcgtcactcttgtgcgcgccccttcggctctggcggctcccctcacgaccacggcgaccgactcgctgtcacgagatacgaccgacgacgtggacgcgtcctcgaccacatggctaaacgtatatcaaccggctttgcgacagatcactgactattggcaaagccaccatcgacgcgtcaccaatggcgagtctccttcgccgctcctccttgaagccgaagaaatggccggtggatggggccgaggtgagcaagccgttgaacaggtctgactgaatcgcctgctgacctttactctgatccctagactacctcgatgccaacggcgtggctttgccgacggcgattctcgctcgcctgaccgacttgacgaacactgcacgttaacgagatttctgtacgaccgttcttcctatcgacgacctgatatatgacgagcacgtgattggttttacatgtaaactagttgaccctgcggcgagagcttttacgtatgtcggggatgggaggagtcatctctggccgcatgacaggtggctgttcgggttgtcaacgttttatccgacgatgaccaagcagctccacgtcaagggagtcgagcttctcaggaaggcgccacgtgtcatttccgccaccgctttcatctaccatgcacccgtgtaaaaaggccaaaagtatgagccaagagccagacccattgacctcgatagccaaagtttaccagtagatcgtgaccatcttgtcgaaacaatgatcgatttcactctccatcgctccatagttatcgaggccctgtcaagcccatccggagcggtctcagaatcagtgacgcgcaaagatgcggcgactcagacgtcgacggtgaacgatgcggcgacacagactgacttcctggagtatgattccgtcattaccatgtcgaataacgagcaagtaggatcagatgcagagacagggacgctctccctgctattgagggagacggaaagtgactttggtcggtgggagcaagaagatagacaaggggaggcatcgcacgcgcagaacctggcgaccttcgatggaagcaatctgactggcttccgcgacgcatacagaaatatcgcctctggtttgtttcggaatttggtatctagaagcgaggccatagagctgatggaagctgagcttgaagacggttcctcacctgcatcagcagacacgctacaacgtcgcatcgactgtttgagcacggatctgaacgaggtcggtcgtaagcgagatgaagctcgggcaagggcgatcatgcgcgtcttcgaaactcagcaggcaatacccaaggctctccaatccgagcgccaacgagaagcttcgagtgatatccgagtggccaagttgtggctctgggagaagaagcaaattgcggtggcctttgatgctgaggcgctttgccgtctggccatggccgactcgtttttgacaagaccaaacagttcgttaaagaatggtatcatcttgcaatattgtcactactggtatttgagatcaaacccgaagcctcgccaaaaaataagagcaaggttatgatgattagacctgatggttgaggctttcgaaaagagaagcgattgccccgagcacatgtatatactcgagtaatctgaatttagtactttttcagctatcccattgattgctgccacccgggctttcactgagcgtctcatgagggtgttcgtgatcggcttcagacgtgccatcgacgctattgtcgcgaggcgtcgcgacgctgtacatcaggtttcggttaccttatcgtcagcggcacttcaacgacaatccaggtaggccaccactgatggcatggccaagatgggacggctacgatggttctcgtgtgtgcccaaaaacacacacacaaacacgaacactttggcagggggcattggattgatacgcatcatgagcatgacgtgacggagcatgtacggcagtctataagccttgcttgatgactgactgtccgaacacgatccgacagcaaggaccttccttgacaccaccttggactggcaaatgagcggattattacggtatgacacataatcgacccggagattagtgatcgattgcacataaagcaaatgggcaacgaaatacacttacgctcaatcttattttcggggcaaatctgatcaagcagagcgatcgagctagcgttgttgaactttgcgtcgatgacaattttctccggttgcgcggtataaaagttgcactttttgtccttcacgttgtaggctacggctgcgcattgctggtcgatccctatcgaccctcccatatacgtgtgtcagctggaatgcgtgtcggtcgcggacatgataccgcttaccgaagttcttgcgggtgatcaggcaagatttagcgcattctaccaagttgtccgagtcgacattatggaactacagcgcaaaaatgtcggttcaacacgagcggttggccacttcgcttatcaacctaccggctgggcttggccaaactgtcctttgactccctcccagccagcaaatggcatggtatagggcatttggtcctgcgaactatagacctggaaaccatcggccccatcggccttgcagtacagagttttatccatcttgaacttgggcgtaacggcaggctcaggtgcagcgacagctcgctcagccagtccagccagcaaggggagcaacgcaatgaaagagcagattccggatcgcattatcgtgttgatgttgattttggtttaaaagtgttctcgcaacgtgtactaaatcgtttgttggtagttgagtagtcaagggtatcgtattgaagtcacaattaactcgaccgtcatccttatttgtaccttctagatctggtcacctgtctgtaacaacgggttctcgatcaaaggaagtaatgcggaacccatccaggagatgcggagacagatgttgtgttccattgcatcccctttcgaacctgacgtgtctgaaatgtacaacaatctggtttcagtattacgtggggtctaccttgtccgcaatgaggggttagctttccctcgcaacaactcggacgctgccgcttgggatcgattgaagaagctgagctcgaatttgctccagcctgtatgcagcttccgcttcctttcgctgtgagtcctctttcttgaactggtcgaatagtcgtttgacatcgtctagcttattctcctgctgaaataaacaatcacatcatctaagagagactcttgacgaacgcccgcccatgtgccttggcgagtggtacagggacagcgttcccagccagcaaacaaagctaaataggtaaagatcagcggtagcatcacgaaggcctcatcagtcaactcacaaactcgtattccttgatcaactctgcactatccaactctttccatctcagttggacaaagtcggggatcccttgagcccggagtctctctcttggcgtaaaggttctttgttgctgtcaaattgatgattagtactcggtgaggtgacgtgcgaaacgatagtactcactgtggggtgcgcgataaggcttccagtcgtgacgcatgggaaagcctcgggcagccggtgtctcccttccttctcgctatcggccaacagcttaccatatgccgattcagtcggcacatgacaatactggagtccaacccgaggcgtatctttgtacccgcgcatcatcgactggtagttgttcatggggccgcctttgtacgacttgtccccatgctggtacccatagaattgtgccctattgccgccgagaggtacgtacccagacaggatgaatcagcgtaggcagcgtatcggtaggctttttgtgtcgattcacctgtatcctccgtcaaacgccgatgtacttgctcccaaaatgtccgggaggtcggagatcgcatcctgctgggtgacgtaaaacatcggaccctgtgctggtacaggctgcaattcgtagcggcacaatctggcgatgcccgttgatccggcatagtgggtggggcgaggtggcgcggggagaggaagcccgattttggtagcccaaatgaacacccgtcgtctcgactgaggggtaccatatgcggcagcctgatgaacatttacagagaattgatagctaccgatcgtcgagtcagtagagcaagatatggcgggaactacttgtaggctcacccgaggtccaacaatgccctcaaagcgatgcaaagtatctctgcttgggcgcttgccgtcccattgcgatgatacagcatgccatccacacattcgatcaggaggtgacttgcaccggatacctgaagaaggccgagaacctcgaagatgactccgaggcgaggatcatcgaccttttgatgcctgagttcaagatgatatgtcaactgttcgtaccggaaagacctttgcccaggcggcgcttacctgttgagcctagagaacggctgacatggcactcctgcctgaagaatgacgtatctgaagcgattcatcttcgctcggaccttcagcacttcccagttcttcgcggcaaacgccactcctttgtccacgacgatagaggtcgggtgtagcttcccgtattgctcgacgatatcagcgtcattctcgatcgccagtgggatcgaggccttggtcgtgtcgacgacgcccatgctgaagccgccgattcccgcacaacagtcgataattccggtctgagctcctatccggacggtcgtttcatgttggttgacgcaaagcctgatcaaagagtcgacgtctccgagaggcacatctcgtcgcatgtctagcgccgaaggtcggaacagcaagcagttggtcagtttttgtgatcgagatgaatatggcgtgatcgagaagattgctcactgttcagaaaatccgatcgacctgcatactgtcgtctcttttcctcactctggtagagatagtcgagactgaatggtccgtcgatcaggacgtagatgtcctctgtctcgtctatgaatcgcttgccggtccagaaatctgacagggtcgagccgggacgaagggcctggccgagctgcgtaaccttgcttaatccgataaacttgacctgagccagaacatcctcgagactgatcttaacgggagaggacttggtgttcaaataccaaagcttctcatccgtgcgaaacagtcctgattctctgaccccgtcttgcttgacaaatgcgtcccatcggctgagaggcagcactacgagagaggtctcagagactctcttcacgaggccgatatcgcaggggtctcgagccagatccgttccgggtagccgatagacgacgaagtcatcgacagtaacacgcttcttcttcttgtctttgtcggacttaaagaggcagccaggacagccggcaatgtgagagtgaggagggatagcgatgaggctgtttgtcgccgtggtgatgctgtatgttgatgaggtggccgttttctaagcacggcaggtatcagagatataaggaaagatggagggaaactgaccgatgcgagcagatatactcgttttcagcccgaaggtccgggtgaaaaccgggtcggacatgacccgggacgatctcgatcttctcgacaacgtcgctgaacgcgacatctctgcagtcctccagctcgaacagacgcttcggatgtgcatggccctgaagcatgccgtctcgttcatgtctcagaagatgaaggtggagagaagggttcggtcgtgcccctgccccgagcctctcatcgatccgtttgactcgaccgaacactctgcctcgacatcgaacgacgtcgccgcaagagatgtagaaggagtcgccgtcatccttgatgaatttcaggacgacagtgttatccttcttcaagatcttgcacttgctaggtactaggtcgtttttcagccgtcggagttctttgtcgacagcggccgtaccgacccatttctcggggaccgcagggtgattggcggcatctttgtagatgtactggtctgctccgacgtagtctcggatgtagcgaccgacatatcgagtgacttggactgctatagctttctgctcgtcatcgtttccagttccaccgacgtaacttgcggggttggcactgttgttgggcatggctacaacggcgatgtcttcttcgtcggccaagtccggggttagatagtgagcgtgcgaaacgattgagcaacgatatcaaccaagatgatgactatatcgaacgagctacgaaatctctttttctctcgaagtatatgtccacttcaatgtgaccttctcagaacctgctacccaactatgcttcttcgaaaaacttcgccgatcgttcgagttttcctcttttgttcgtttgaatcgaccgatgatcccttgtgttcaaccaacgatcgactgcgaacccgtattcttcggtcaagtcgactcgtaacgattgtgttgtcttctacaactaatgaccatggctacaattatcgtgatgggtatgatgagcgtgatcgtgatcgtgttttgcgatggggtcgtcctggtgggtatgagtgtgagtttgagtatgagaatgggtatgggcgtgagcgtgagtatgactgtgagcgtgatggtgatggtggtgatcgtgatcgtgatcgtgttgatgatgcttgtcgtgttctgcagcatcggcctcttcggccaactctttctccctcttgacgacgatcgtgacctcgcccgtagcctcaaccagccgtatgcctggcctcgcccggatcgcttcggaacatcgctcgtagcagtaccgcgtcaggtccaggatcgccttgtcctccagatcgtcccggacacagacggtcaagttggcgaccatgatgcatacctgcgagcccgagacctgtatgctgctcgtcccataaagcgaggcggtcgagaacgacttgtcaaacgatggtcggcgcgagtgagctggagttgaaccgggcgtgctagatgtgcggttcgtcgcggtcgatgccaatcgaggatcgtgaggggtgagttgccagatatgaggtggggtcatgcgcaggacggaaggatggtccttgatctgagggcgtgagaggttttgagcaaaggaagagtcaggacatgcaaaccaaggtcgactcacgtcctcgaccgcctttttgaaagacaacatctgcaccgtttgctggggaggcgccgtttgtagcaagacctgcccaaagaccaggctcgacggataagccaaccagaaggcgactcccgcttcgatgaacgccatgacccgttcgagcttgagcatctgatgactaaccaccggcgaaagtgatattagcgacgacaacactgtggaccgactcgactcggcttacggagcgagtccgaggtttccaagcaacataaccgagatgcacgacaagatcgctaatgagaacgggttggcgaggaggagctcgaacatggcaagcaagccgccggcatctccagctcgagcgactttcacgggactcagtctgagtggcataacggcgggtccgaccgctgcgcagcgcgttagaatgtcatcgtcagcatagagtaggaaccagatcgatatgcctgcaggtaacgctcaccttcgaccaatttggcatggttttgtagagttgttgcggacagcagcacggccagcgcaccggaagccaggagccacaatggccagtccctgtattcagccaacacgacatcgtcagctcgcacaaagtacctcttttccccgacacacgacaattcagactcacgccccatgctggtcggtcttctcatgcccatgtccgtgagcatgtccatgcccatgtccaccgccacccgaccctgaaccggacatgagagcgatctcgagtgcttccttggcgatgtaggtcgccgagaacagcaggaatatcgactgcacaaagtaaagcatcgattctttgcggtgtgcgctgcggaaacacaacatggtgagtcaatatgccagaccaacaagtgagacttgggactcacccgaatggcttttctgcagagctggtcgagccgtcacccgatttgatgacctcgctccatagctttacccaaacgcccaacgcatcgaagacgaccaggtaccccaaccctgtcaacccgacactacccaaaccttgccccttgacccagatagacgctccgacaaagaattcgagcgcaccaaacccgagcgtcatctgggcctttgaagacaggttggacatccgtgctatccacgagctcgacgtcgtgggattgctaatcggggaaggtaagatcggggcggtcgccaggttgggcgaagatcgtgtcccaccgatatgattggtcgccatgggtcgaggcgctgcgtccaggttggccaagtccgggttagtgacggtagggtcgagaaaggagaaaaagttatgggacaaggagtgcttgtgctgcagacgcgggccaatcagatgcggttcagtcgatacaacaaacacggtctttaggactcacatgatgacctcttctaccaacgaccttgggctcgggacttgaaggaggtggcatcgacttgtccatcgcgccccgtccgaaactaaacgatccatccccgcccagcccaacctttctcctcgtcttgctcgggatatccgtcactggcgcttcctcgccttgcatcttcggggaacccggtactcgagcttcggccccgggttgagggaagaacaaggacaagtttctcgcgtggattcgaccgtctccaccgatcgagcccgtccggccgtgtgggatcgagttcctcggggtcaacggcggatcgtacgtcccaaatcggggcgagagaggatccactaggtctcccccaccaaagacgttgttcgcgtttccatgaccatcctgatcgagcccataatccggtctcgggaactggctggtgagcgcgaacctcgcaggagacatgggcagatctggcaagaccgagtcatgctcttcatcttcctcctggttgtacgcatcgtattcatcttgactggccggaggatggtcggttgggggagtcctcatcaaggtcggtcgttgacccgtcatcgtgaaagatcccgagtttgtaggggaatgatcggctccgaacgagtttccgatagaccctacccttggtgtcggggtcgcaggctgtccatgatcaaaaggcaatcgaggtgaagaaggtacctgggattgcgatttgaatttgctcaagctcgagccgtgttgagaaaacgggtagagcgttcctggggacggtggggtcgccatgatcgaactgccagacccgatacgagggctgtatctcgttctgggcgaaggtgtccccccggcattgctcaatccatgtccaagtctcacgggtagagtaacttcctgctcccgctgatcagcatcaccgacttgagctgccgggtcgttggtgtccatcgagggaaagttccggattcctaaacctgcgagctgatgaggtcgatccgcaccgctggaacgccgacgtgatgacacgggcgtggtcgacgacatggccggtgttcgaggcgtcttttatggcgtgccttctgtctgctgttacaagcctacgaccagtgctctcgggtggtagtcggagtacgactttttctaagtatatcaccaggtataatttctttagcaatcgcaatcgattgaccaacaacgtgggtcgcggatacgagcgaaacctgagtgacccaggttaagaggacgcgaatgacgagagcttttggtgaattggagcaagatttcaacgacctatatcttgatcgatagcaaggctagcaacgattttttttgtgtatcaggattataatgactagggctttcagtcgaatgtatctgcacaaacatacactcggaatggtcgctatttgacagagatacaggtcgttaccgcttcggagcacacactcctcactcctcatgcggcggatgttccttcccgtcgactggacttcccgtctctcgatctcgctgacataagcaaaagaaacgtcaatctttacaagccttgagaccagacgatcgactaagcatgttttgggtatgagatagttttcgaaaaacacagtttgggatgcaattatggattacatcgagcacatggtcgacgaagatggcgtgaaaacacgtctgtgctagcccccctcatgggcaacttttacacggagaaagcgattggcagaacgacaagaggacagggcgagcaagacgctcgcctcaaaacatactctgattgaagacggacggtgctggatgatccaactgaatactgtcaatttcgtcgcccagccccgaggcatttcaaatcagctcggccgtcacaatgacgacccgtgtggatacccgttcactcaccttctgtcctgccaattcagcattgccgccaacatgtcctgatcatacatcaacggcatcgtcgggtcgtttcgagcggggatccagccgttgctctcgctcgtattctgactcgtctcgatcgcttgcaagatccggtccgtatcgtcaaacatgaacatttgcagcaccgggttgacggggtccggttggacaccggtcactggcgagggtccctgagtggtcggcaccgaggccgcggatgaatcttgattgctagaggtacgtttcggggtcgacactgtacggacaacgtccttcatgacgtgttcgatcgatttggcgctcctctcgggagattcgagcatctacgggcgcggcgggggcatggtgagctgtgatagcggacggcgatcgaaacgcgacgctgctcacctgcagcatggccaagatgatattgtctcccctccctgcggccctaacgatcgagggtagcttgcacaccttcgactcctcgaacagccggagagaggctcgtaactccgacttgaccctgggaacctcgtaaggcgtgtgtagggcgtgaatgaagagcacggtcactgcggaaagatggtgtctgtacagataccatgctgcaatgcagagacgttagctgtttgcagccatgccttgtagcatctggcgaagcggcaaacctttgagtcccggacgcgaactcgtctcgcgatgtaaagcggtaatgcgaaaggcagactcgacgcagcatctctgagaatagatgtaccgcggctcccgatagctccgaatgagaaaagggcggtgcaggttcaggtatcgttgatgatatccgctgatatcgcgaggccgtcttggcgttagctcgatgttgctagtcattcaacagatcccgcacacatacctatccatcactccgaaactcgtctcatccggattgatccggataaacttgaggtcaagtagctcccggtgctgttcgcgcaactcggcatcgcgggccaacagaatgtcatacgtcttgactccgttgaccgccagattttccgacgtccgtcgccaatgttgtgcgatccggtgcttgtgcacttcccatgtgttttcggtgtattcgttcagaggtcgaggaggtactatcgaagcgtagtccatcgtttctttgaagttttgactggcctcggtagtgaacgatcctacggtattgcgatattcagcgcgccatcatgtcctattgtcgatgacgcggacatccgactcacccgctacaaaggcatacgatagactattccggtgagaaccctgtctgaactcgctgaatgtgtcgtagaaaaagacggcattgaacgcctgacaagctaattgtcgtttgagcgtgctcgagcctgggggtaacatcgggtcatcgtctggcattttcaaggggtctgtaccgagttggtcaaggttgaggagcttgcaaatcctgccacgacgtgtccgagcctgtacattagctcgggcgaatgtagtcttgtcagaattcggcaacgctcaccctgccatggtgcccacgatcgtcgtctgaagcgaaccgggaaccacacccgacgccatctcgatatcgaccctagagagtcactcgaatcattagtgtcgaatgctcgcacttttcagcagtgcagcctcgtcctgcttacgatctcgacaccctgatcgtcgcaacagatagcaacatttcgacagatcagttcgggcaaatgaaacacttcgtatcgcgaacctaaactcacctgactagaaacgtataaagcaccctcaactgcggcttcatcatccagtccgaacataacaacgccgtgtctgaggccaagagagcgtccctcgatagctttcctaggtccaagcgttgcagctcgatcgggctcgcagcgagggaacttgggttgtcctgtatatcaatcgcactcgtgctggaagcaagaaattgggcttcgggaattagcctaggaccgacttcgacgatatgagccatgggtagtgacttaccataacatggtgcagagaagggctagccaggccgggtcaaaggtgtaacctggatatgaccggtagaggagaaactgccccaattcttctctgaaaagaacctcgtgcattggatgccctatccgtccgcagtcatcgacagggacccgatcaatctcgccgtttgactacgaatctcgacaggaggtgtaaactcacaggaccgcctcgcttccaaaaaaaactcgtcgattaattttctgaggacctgttcccccgggatagcctgtagcacctcttccatatctctttcccaccgcggattacccaattttagcgaggtattaggacacgcaatcgagggccatgctcgagctggttccatcgccatggactgatggtaaccatgttgataatcagggtccggaaggcaatgtccggagactgcagtatgagaaacaatctgataggcgagaagtttcttgtccccctttagtggagagaacgccgatcgcgggtcaccgtggtgcggactatgttggggattcgggctggaccgaggagaagcacgtccttgaggtttttgttgctgctgttgatgtgggatcgaccccgcccttgatctctgatttgacccagctgttgcgaactcttcgagcgtattcgctgcatcctctagttcattcaaccggtggtatctcctgacgaaatgattctgcgacccaggttcatccgtctgcccatgtctggttgaagagcctgacggttccggctggtttccgtaagtatttcctgctcccgcggcacgtccggtccttgacgacccgacatccaagtcgtttccctgtctgccacccgtctgtgcgccatcgtacgacgagcctggaagctcgaggatgctttcgattgtttccaacctggagcgcagtgagaggaaatggtcccacgtgacgagctgctgagccggggtgactaccgtcccgtcgtcgtattcacatcgatcgccttcgtcccgtagaacacaagtagtacatggtcgggtcttgctgcattttgctttccgtttcttgctaaacgggagagacgggaggtcagaacgaggcgagagagatcgtcacaaattcgagagagatagcaaaggtgctcaccaaggcaaacaggccagctggatgatcgccagtccgcaaggcaaccagtaagtatccctatttctcaacgtaccacccgctcctactgaccgtcagcctttttcgtttgaaactcgtcccatcctctcgatcgtcagaatctgccctttcgatgtttgatccagcacgcggtacgtcgtcgatcatcgcgtaacggaatgttcctcaataggaggtgaagccgaggggactgggtagatcgcagacttcaataccacgtcccgaacacatgacgatcagctaagatcgatagatccgatagagtatgctgtttgacgatctcgttttcgattcaaacccttcacgccgacctggttgcgtatatcttcactcgttgtactaaacggacactaatttacttccgcccatgccttcgtatttgcttccgtgtggtgctcccgccgtcgccgatgccgacgccgaagtcgtgacgaacccgatcgatcgatcggatccgagaaggtgggctaggtcgaacgagagttgtcttgaatacgaaacgaggagggccacatgaaacaccagcacaacgactcgtcgcaggccgggctttggcgttttcctcgtagatggatcaacagctttcgctaagttggcagtatcccacaatacaatgaactatcccgcccttgcagcgagatactagcggaccgcccgatcgtgtattactcgcttacgacccttgaccaggtcctcgcctcgcacaatattgctagacttttcaggagagcttgcctgcctagatgcttgtacgaaacaaaaggatggcgttaagataacaggcagtatggcctcgggtgataccttcaacgaccatagccttgcgtcgttgtcgatcaaatggcaacgcgaatcagagttcaatcagagtcatactctagtatcatattcttgtttctgtactgatcgagtcatgtgatctcttgtgttttagactagctatttcttgctgtatgagtaatatttggggaatcatacgccggattatcagcagagaagctttcattgaccagacccttgattggcgtgagtacaagctatacctcggaggtgtcagttcaattttcaccgcagacaccagagactgtaacgaggataagcgcaaaaggaatatctctatattggaacacatattacacacaacgtccttcaaaatggactcgatcccgtaccatcatgttcctttcgctactctaggttactttggtgactctcgacagcttcacgtcatcgcccaactcccaggccgacttggtcttataggcttgtcggattgcgaacaagaccgactctagattcgccgaatcgtcgaagagtcttgaaagctgttcttggacccggtttgcctgtttgagagcctgtggggtaccgtgaggcgtccgggtctccaactgctttaggtacttcagggaaaggactgaatttttcacggctcgaaggccactggtaagcatcttgtgaacttttgtctgcaagaatgtctcgtagacacgctgcttcaggagatcctgaaaacgtaaaaattctttgatggccgtgttatctttacctacgagttcctcccattttgagctaagatcgtacaattgatccgctgccgtcttccagagtccaatgctaaagtcaggccttgggggttagatgtgacgtgaacgaatccaatctcgtatgtacctctttcggtcaaacggaaagggatacccagatatcgctcaggccgatcgaccggcaggtcttggggctttgcctcgactgtagactcaatctctcgctcacgcttaggaatggcagatgaattcatttgctcgttctggacgatgctggacacggacgactgattatactggctcgagaatacgaggctctcctcggtttcgacacacgaagacgaggtgccatggtaaccgccggctggaatgcctggttgctgatggaaagaagctgcatgagcggtcctgcctaaagagtgccaatcttgatcagtccgacggcgcacgcgtcgcatagccggttcttcatgctgagctgtctcttgcctcgtttgaactcctggttgatgtccatatgctccaaatgaacccggtgccaaaagagcggtcgaattcttcgacagacgtgcacctccgcctcgtaaagtatctggtggcaaaagggattgatcgggagtcggcgtttggcgtgggtctgtaaattggaaagatttgccatgcagatcaagatggtcaacaacatcgaacggggcttgactgtcccatgtttgtggttcgtagtatgggcgcagaccttggaaggtcgacgggttgtcatttaccgccagacgattacagtatgcctgggctgtcgtctctggaggaaccaattcttgcagatgctgcggaacagaaaggctggccggcgtattaccgtaaagcgagaagtcaaaatattcacttcttcgaatagtccaaggatctccgctccagccctcatgatagtcgtcatcgccggagcatgcgtcggattctggccacatgactgcgtcgctttgatgagagctccggctagacgataccgctttctcgataagtagatatgttggtcgatcgccacttgatgaccaaccccctccgcttatatcaactatcttaaaaggcatgacgagactggttctcgggaaatgactttgaacagtatgaaaggagcgacaaatctgcggccaacgaggtcagaagggatgtgatgccgaatatcaagataaactcgggtttatatgtccaaacgggagcgataaagccgacgtgatgacagtattacatttcaaaaatacatcaagagagggtatctttttactacggctaagtccgcgcagttgggcgcttcagtgaaaaatctgttcacactcgccccacctctcctagttcaagcttctttacctcccccagcttcacggagtttcccaaattccaccgtgtcttgcgattgaatgtttctcgtatcaccagcatcaagggttccagtttctcgaacgcctcgcacatttctgtctccattcccgccttattgcttcagtggaacaccgtaccggtagttagataactccgacgaaagatgcttcgtatatggtggcgaagatggccactcatcaccttgaggtaaaatatgaaggtctgctgctcgatccattgtcgtgatggattgatgatgaatgctgagagacactgccactggcgcctttccatcgtcctgtggtattttttaatttcgagatcgccaactggtaactggaatatatgtactaaccgacattagacacgatacgcgcaaaccttctttttccacggtgacacatccacgtgagcaccctgaaaggaaagcacgcttccgcgatattcgctgctgacctcgcggaacgtcaggaatttcggcgaggtagcgaccgaagctttgtcatgagatacccgatcacggaaggtctaaccaagcattgtgcgatcagggatcatgagcgaattgaatatgatatcggatatgcgaccaacctacgattgccccagtaacatagctgctaggcggtaaatatgatcaaccacggatggtacactgatgcattattttgcaaaagcaaagcgggattctggactgtcctgcatcaagcctgacctggatagcatggcatgtcaacaagtgacaacgtaaatgatgctccccacggtagagtcgggaaagagtcgcacaacactggaaaaaggctaattcagccacccaacaattcggtgtgaccagggaatgatccagcgctacgtcattttccatcggaacctggtcggcatcgaacgatctcgatagtaaggctcatattttccggcgacctcttctgccccgcatagaattctcaatctagccggagacactctttcaatctaacagtccctctatgccccacgcctgagtcctctcaaaagtcattcgcaccgccgccatcatcggcttcaccgcctcaatttccctgttcaggggctcgaataatcccgtctggaaaagctgtgcctcggttgatctaggcttgtcgctgatgccttccggtatacccaacactcctattcgccaggctaacttggtcgcagtgacgaaatgtccactaatttttgtaagaatattgcatgctaaaaacttcccaaaatgagcattagacaacgccttgcgaagtcgatcgtgctcctgccagaaggtattgtcgtctaggatccccttcagtgtcgaccgatgtccttgtagtcgttctacctgctcaaataaagtttgtagctgcttgatagccccactgctcacaccaaccaagactactttatacgattcccttgggtattcctgcaagtgaagcaggaaggtaacaccggcataaaattcaggccgtgactgtggcaaccccacaagcagcgatactggagcgcggtttgagggcacatccatcggccgtgtgattctagcgtagctttgttgatcggtctcgccttggacatatgggtctttatgacacctagacgaatcgtacgatattccgcccttactcagcctagagattgtacggttgctgatcaatgacccgccctgcgaggcctgcgtgcgagatgatggtccctgagctgtgaacgattcaaggtcttctgtttggtattgcctctgccggtgtttatccttcctccgccttcgagccaatccgtctctgaccttggtagttgctcgaggttcctggggtgcgaattgagctgttgatgtcaaacgtggtggtggtgatcttgaggaagtcgccgttgaacatgaaccaggagagagtagtgggcatgacccgtcgaagtcagtcttgtgcgaatacttcagaatcggagactgaacagtcggtaggatcgtggtcggtagcgtgcagactgtagggttgatctccgtatagtaatttgcttggaatgggaacgcctgagctgacaacctggaagtatgtgttttggcaaaattatattctgtgctctgcgaacccagaatgcctggttgtgacggatataccaaggaagtccagtcggcgtctataaggtgacttggaggaaagatggtttcgctcaagtcagcgcatccgaatatgccaggcggctattcggcgagatcatcgatcgtaatcacaggttgcgaatctctgcaactaatcctatccatgatagagccatgcagtggacaggcttcacacatggcgacagatgcaaaagtgaggagccagcgacttgaactaggacggtgagcttctcaattttccaatcgatacaggccataagtttctggggcttatatggccgttcaagctacggtcgattcttaggatcagattgaggacgtgaaaggaagcttaggggttaggggctgtctctagacatccctccaacctctcctccccgaatcccccatccactcgtccttatccctcccgcttccccctgtcccattggactgtctcctcccccacccttggaacccaaacgcagacttgggtctaggctcggtgaatgcgatatcgttggacttgtcgatgaggatccggtggtgaggtgtagcgtgagcgtgcgggtgtgggagttgggtcgtcagggaagccgattctttccgtggtttcatcgtggtataattcgaggtagatcagtgagctctatgggtacggggtttgtagtgtgagcatgcgtgttagcaactcgatctgctgttatagtagatgggatgttgcttgctacccggataccaaggtatcgcttcaaggtggaaatataccaccaacgatgagtatttccaccctcactgtcggtacgtaataatgaggtggaaatagaacaccttcggctactttgtgttatatccacctctcacttgatcgtaggtcatctccggatttacctgcctccacctcgatctaagggttcaacgttcaagacgagtcgagtcgtcaaggtggcgaaggacatatagaagagttgtagcattcctcaatcacatcacaacgtaccaactccagcaacaatacctaggcagcgggttcataatcatcaccattgaataatcccgtcgaccgggtgcttgcaagcctcacgatggataccgggatggacctcgactcttgcaggtcgatgatcgaagacgagctcatcatcctcgaggtgagccgcgagcagtctacccgtccgaaagactcatatcgcccatagactcatccgaatctgatttcgaccacaatcttacactgggtctctcataatgtccgcacgtcgacctggtgctaccatccgtcgttgacctttaaaaagtcgatctacccatccagtatagccacccaaacctcggaagacggtaccatcgaccttcagatcgagctcgaaatcaatctcccgggcaagacgactttctcgctcttgtcacgtgtgaaagatcctttggcggaggtccatggtgcgatgggtgaacacggggaggtcgggagagggccgagggagttcagggtcggggaccccggtgggagtaccggtcatgggaacgcctctacgtccagctcgacctcgaaggcggtaacagacccaccaagaccggcgttcaagctagagacgaccaccctccccccgctttcgatccgggtccggttacctcctgggtacccgggttatcgtcagccccagctagtcaccatccaggatcccgaagaggccgaacaggatcctagaaaaacaacgatcatcgcacccacacccacacccatgcccatatcgaatttgtacccatcttccacctcgtcaatgtcgactttgacgtcgcacccggtatcgacgcccgctcggacgcgtacgaggccgtctcctacttatctccccacaccgaccgtccggcgtcttcgaaggaagctgacgacactatggaaggaatcgggggggacaatctgtttcaccaacgggggcagtccaggcttgggcacgggatgtggatcaggatcggatgaggcacatacccgggatggcgaggaggatgaggggtccgatgtcgaacgcgtggatgggataggggatgatgctggttgtggttttggggacggctcaggtgggcctgttctttggggatggttggactgggtggctagcggggaagggatcttggaagggctggacaaggatccggaaggagggttcttgtgagtttcttcccccacgactcgacttggctcgtacgaacgagaggacaagccaactaaccccgacccgttgacacgctagcctaccatgcgaccccgaattccctcgaaaagtacggacacacgctcgacgtctcgacaagagggaattcgaatcccaagtctgggattgcgggatctgcctcgagagcaaaaagggcaggttctgcgtcaagttcgatgggacggagaacgatcaagatcaggacgtcggcctgtttgtcgaacgggatgagaaccgaggtcgggcggacgttgggtgtagatgcgtcttgtgagtctggcatccgcgtttgctcccaggggtggatgtttgacatcaattcgcgatcgttccctacgtgatagctgcaaagaatgcctctcggcttgctggacgctagctatcaaggaaggcaacgtcgaggccgtctcctgcccgtcgattacctgcacgaaacgacgggtggacaggcagaaccgggcgcaagatcctcatgccacggcagagagcggcaaggcggaagagggggtgggtgcacccagagcagggctgggcaagggagtagccggggaggttgcggtggccttggtacaagaggtcgttggcgtcgaattgcgggaaaggctggaatggctcaagaggaagaaacgggtagagaacggtaggtaccgttacggcctgctcgcaccgggaaacgatgggctgagctctgtcttgatgtcgggctctagacccaacgtacacgacttgtccgcttcaacactgccagtcacctgtgccaccaccacccctcccgaaaacatcgaccacaacggcggcgatcccggcgaggaacgtgttccgaataggcacggcgatcgtcttgacggacgagcaggtcgaggagaatcgtaaaaaggaagaggacaagtgggagcggtatcgtcagtgccctgggtgtaggttttcgttctgtcggtactgcttgacgacctggtgagcagacaaaatcgcgtctggacgagatcgctggaaactcaaccaattgccggtaacgataggcacggtccgcacctcccttgccccttgccatcgacatcaaattttctcaaagcctatctggccctctccccagactcgcctgatcgcaagatttaccatcggaggtacggcaaaaagaaccttgatcgtctgcaagcagaatacgaggagaacgaggccaacaggaaatggttcgaggggcatacccgggagtgctgtggatgtgggactcgggtgcaaaagagtcagggatgtaatcacatgatctgtgagtttcccaccatgcagggctggaaccgctgtttgtcaggtgattcatggggtcgtcgactgatccgtcatcgcgcttcgcaggctccaagtgcaacgcgcacttttgttaccgatgcggtcaaagcgtgagattcactctatcgcacattcaccggatgagacactcgctaagacctcgtctgtcactgcccaacagcttcgaccgtccgacccgtacatgcactttcgaacgcccggatcgtgctgctttgaaaaattgtttgacgccgatgagatcgctcgatttgagcgcgagattgggggtgatcaggaggcagtggggtgggacgagatggtcggtggtggagtaggtgggtggtggtgaatagagcgctgaggggccgtattttaggatcaagattgtagacaggatgtaatatcccgtcgagcgtttcaagtatccgaaacgaaggtctgggacatatctgcttacataatcaggggaatcgtcgtgaccctcccagttaccgagcgagagcgatgatgaggagactcgagattcttaatcgtcattcgattcgacgtcgttatgattgctgacccatacccagaagtacaagcattgcataaagctcggcctcgcaaatcaaacttaggactgataagggtacacacgccaccgagcacggccggaaaagaggctccttcgaggcaatcacgcggcaatcaagatgtcgtaccttcctgatcatagagtcatgtacgattatcagcagggacatagtcagtcatttacagcagattcatcatcagaataccagcttatgtacgatcctcgatctgatgctcagtagtggccatgcagatgcacatggatgatgatgatacggacgattcggatgacgacgagcccatgacccacgcaggatcccctgccatgttctcgaaccacgccagtccctacgcacagccttctccagccgctgcgccttcgccggaagatgtcaaacccaacattcatagcatgggtgccatgtctccatcggcaccggtgtacggagaacgtctgccgtggatgactgacgagcagctgcccaccccatcgggacccccttcggccgctccgtcgccgtatgaccaaaaacctagggtagacgacgacgatgggatggacgtcgacccagaatcgacaggagacgcatcggatcaagaatccgaggaaaaggtcgagctgacctttgaggaaaagatgcaacagaggttcccagcgtttgacaagaagaagccgttgaggtttaccgatctgcaagccatcgatccgattcgggagagcaagaagaggagacttgaggaccacggtagtgagtctggtatcgtcatctagtgatattcccgcgtgtacctcgctcaagctgacgacatatcctctctaaacagtctcgtcgatcgaggccgaacatccgcattcgtcacaagaagccagctttctgcgcccactgaccgtggtggaggatctccatcagcgaagggtgcaagcatggacggcaccgcttctgaaaaggggacgtagacggtcagataggcgggcgcctgcaggattgaacgatgggaataggatgcatcaattggtcactcaggtcagtgggataggacctagaacgggatctttcgcatccagctgacgaaagatccgatcatagttcggcatcggaacgaccaaggaagtgccaactacttcggaagacgaacatcatagtcgcaaacaagcgtccatggtggagctatcaaattgggaagaccagatcgtatggggtgtcgagtgagtggcgtaaccgccgccgatcgctacgtggccactgatcaggcgatcttctcggccttctggcacgtagtgccccatcgaagaagaaggattcgtccggaattgccaagctaccgaaagagcgcgaaggagttcaaagcctgaacatgcagttgatgcacgacgattggttgtcccgtatagctctgagcgtgccactagaggggtcggaggacagtgatgtcgaagtcgcatgtacgtctcatcatcgaccttgtagccttcgaggaagacccgctcactctcttatctccccatttttagctgatgagctcgacgtacctgttgagagcgtctcaagggaacctactcgggttgcaaaggccctcgagatccttcgcacaccccggaccgacgatagcggtctgacgctggatttctacaattggtccaacgatcattactacccaccgcagaaggctcaaaaggtcactatccgtcagactggattgatcgagatcatccacgctggccctgccgtcaagttgcaaatgcctttcgtaagcggctcctcgatatcgatatttaccgcttccatcagcaggacgctgacgacgacttgcgatctcagtacaagcctcatctgacgacggcggagaagcgtatgcgaaacagaccgatgttgcagttccctaccggcgtgcctatccacttcgacaagctcttgccatcgacgaatcggaccaagcagcagagggaggccatcaaggcgatggagagacaggggaagaaggttgaacccgagatcccccaaagttccaaggatctgtccatggcgaatcgggtgccctttgtgctcctcgaatattcggtgagcatcgcgtaggtccggcctggggtacgcttttgctaatatcgcccctcctacccgtgcaggaagaaacgcccttggcgcttcctgggtacggcatgggctcgagcatgatcaactattacaagaagacttttgccgatgatagcgattatccccaggtaagctccgcctgcgccgatagggtaatgccgcaaagactcactcccctcgccttggattgctcagttcaaaatgggtcaacccgtgatccttcaacctaatgacccgcaaccgtatccgctagctttcatcgatgcaggacagtcggctcggtctctgcagacgacctttagcaatgcaccgatattcgaacatcaaccgtcgccaagcgactacctcgtcataaggtgagtcatgacaagcaaggttatcgtcgtcacaaagactgatcgaaacatgataacaggcgaacggtagatgggcagtctcgctactacattcgagaaataaacaacatcttcgtagttgggcaaaccttgccagccgtgtctcagactaaacagtatctcatggatatgccgacgtctcaagctgcaagccgtcgggctacacgatggatcaggattgtcatcaagaagctgcttgccaagcatggtggtatcgtcagacaatctcacctacggccgttctggcctgactggtcggaccgagattggactctgttccttaaggttcgtgtcaggtcgacgtcgagaggaggaaggcacgcttatcgctgctgtatcttcagaccttcatgttctctgaatcgaaaaagcacgaaaagtattggagacccatgatcgacgaaaatggtatcaacaagaccgatatcgaactggacaaggttgatatgtcgcctgaagagctgaccctccacgcggcaatgggtcaggccgaacaatggcttgtggatcgtggccacccacttcctgccaacgccaaagacgagaaagttctgatcaaggagatgaacgacagtcgcgatctcgttggagacggacgggacaaatacattgaaacgagattggcgccttggtaccgatcgcaaaactacgctgccgccgcccagacgagtttggcgaatggcaccggatccaatgctttggccaatgtattacagctcaaggacgagggagacccgaccggtcgaggagaaggtttcagcttactggagtgctcccggaagcagctgcccgagcgtaagtctcctgtgaggtccacatggacccgagataatggcaacccgctgacattacctcgcagttttcaagcgaacgatacagaagagcaagcgcaagggcgaagacgagagcaagcagaacaacaaggtgcatcgggacgagctcgtcaaatcgtacactctacagcagcagaagatctgggatacccagcggtggtcgttgacatcgtccgcgccgccgaaaccagataagccagacagcaagcggactatacagcgcctgaaaatcgaaaggcaagagcaggaaaggcagcagaggatccgacaacgatatgaagacgaacagagggactttcagatcgggtcagatcgaaagcttcgaatcactcggcaggtcagttgatggtggtcacacgtgcgcatgtcagaccgagagcttatcgactccgacattctacccagaacaaggacgggacgtttgagcaggaagatatcacggaccctgtcgtcatcactgcatatttgcaagcgaaactcacagaatcgatcaagcgtgacggtttcagcgaagggggcttgtacaacagcctgaacagatttgagggtatcgccaatctgaaaaacttccgtatcaaattgtgagtccagtcatcaggctatccgtctgtcgaaaccgctcaaccgttgatattccaactgcccaggttggaggaaaacaagcacgagcttcagaagatcaaaacgggcaagacagacgccccggccaagcggacaatcaaatgcaagcagtgcggcgagattgggcacaattcgatgtcagacatctgtcccaagaaccagaacaaccccgactttttggccaagaaggaagccagcaaagccagcaagcggggcaaaagggtctacgtgcccgagggcaagaaagaattcaagcaggatgacgtccggatggcgagaaaggaggcagagggagctgccgggccgaccgcacctacgatgggaggtactgctggattcaaagtcaaactcaacctgggatcttcggcggctccataatgggcaggttcaggcggcggtatgccatcctagcaaattttgtatcacactcagtccccactatggcggattatatgcaatggcttcagttgctgtgtaagcaatgcgtcgctgattcgcaggaccgagacgtgacccagcggaaatatctacacaagtctagcgaggacggcctcaattgtggctcggtcttcagcgtcaatcacacaccaaagtcctccagccgaaccttcgtctcatgaacctagcatcgatttaggaatctgtcatctcgtgtctgcttttgatctgtatttgttggcaaaccgccagaggtcatgactgttcagctcaacgcccggcaacttggccgtacttgcgtcgcccgtatcatcacagattgcgacgttggaacgaggactccgtcacagacagacagatggccatgtgtccatgtcaccacgttagcaaatcgttcactgcgccgcgcagaaagacgtttctcgctatctgttgatctttcgatcgctcccgggcattgcctatctccgagagccgagcagttaatgcttccggtcgtctgtctgacatgaaacacgtcgatccatccagctacgcgtaacccccggaagcctttcatagcgccaaaggagacgtcattattgttgcgattgcatcggttgtgccatttatcgaagtttcgaatttgatgcgacgaatgaccgtcatgcattcatgtcaacgctgaacttcgccttcgaactggaccgcctatagccaattctatgttgtgccatctgttgtccgttatcactgtccaaccgcccctgatactcggtgcggtattccgatgtggtgacaacttgctttgatgggggctctgagaccctcacgatcagaatcaggcttgcgcccgagacacgctcgagatggatcgagattggatagccggcaggacaccgcgcggagaacgcctgtcgcgcgcgtttcaggttgatcagcgacaggctgtgccctggtaagcaaagggaccgtgcgcctatgtaaatcctttgaacggctcgcttagaatggatcatcattcttttcccggagctggcattgctgtgtcctttagggattgacttcgggtggattcgtcgtcctcgagtgcaaagacactggcagcaaatatatagagagagaatgtggaaggtcgtgatcgtggtctgattaccatatacatgtcctcaagcgaagcgtcgtttcctttcacgattcagtccagatcggggcgcgtgtcggcactacaatcacttttcaattcgaaccgatccgtcaacatccgtaccctgacatggattctagctccctgccagcgcttatttcggagttccgttatgcctcgatctacgatgagaaccatcaaacacggcgtgaaggaatcgacgatatggtcagtgtaagcaccgtaactattactcgaatctcgtattgatattaggaatccaggtcgggcccgccaatcggacgccatccaatcttagtagcctacgagctcagctgtgtccggcgacgggagtctttttcaagaacggtcgacccgattgtctatctcgaacggaccaatgccgtcacaaacgctgctctaagaatcccaacgcgccagcctctctccacatgacttcaggattgagcccaaaatcattcggaccttgtcatactttgccgcctcctccacccccgccgccacctccttcgccaacaacgaaagagtgtcatgaagaaagctggcaggatcatctatctgaacgcactcacggaccgcaagatggcttaggtccgccctttttgcactacgagtttacggatcccgccgaaacccatgttcgcgacgacgaccacagagacgagaaaagaccggacagtccctggtctgcagattcgggaatagaaatatctccgcctcgaccccttaaaccgagatcgaagccggtcaagtcaagcgaaagagaaatggcatccggaaggtcatcggacagtctagaaatggaggtcggactagggatggacgaaggcgtaggaatcgtcgtagatggcgatcggacctggacatcaatgtttggtagtccgctcgggctcgacatcaagcgagacgagggggccgaatcaccgatcgggagtgcattcgacgcaggaggggatatcatcgttgaagttgaagaatggtgtcccggtggagccgggtgcgaccattacgggcagccttcaatgataccggagagagcgttcggctgggtgcctttgactcctcctgccgagtcgaccaggatgatggaaagctacgagcagtacgcatcagggctcacggtcggaatgaaacttccggacgacatcatcgagcctagctcgccatcattacctctttcgcttcagtcgccacctttacagcgctcggaattttcggaattcgacccttcggaactctacccatcgttcggctaccgccacttcgagatgcccaacgcgtgtatgccttacccggccgggcccatactctatgccgctcatcatctgaacggaggacccaatcctcaaccactttctcctttcccactcaacctcacagcaccgatactactccattcgcccggcctctcttcccgatctgtatctttcggacagtttctttaccttcagaaccattactcctatgcggatccgatgctcggcagaaaaggggcgtggaaatgcagtctatgcaagtgcggaagccgagagccaccagatttcgttcgctcgggtccctgggagaatccggtcgagatcagcgagctgggagcgccgacgaacagggtcgcgttgtcaaggttggggttcgacgtggacctgaagaagcgggagcgattagctgagagacgacacgccgaaacccaccgtgggcatggatcgttgagagtgagaaggggaagggaaaggtcattcgaaaagcgcatcaatcccagttacacctcgcttggaccaaaacgtatcgcccacaacaaggacatccaggagacggcctctgagaagcttacggcgacgattggcgaacagttcaacgatcgcgacaaagcgaagggtcacactcgacgacacagctatcaagactatctcccattccgtcctttgccgtcgggagaagggcaagatcgatgatgccaatccgacttgctcccaagaagagcttcgaagcattgtttgagacaatatattagttccaggttgactggtcacggacgatactgtatcgagattcttacgtcccttcagattcactccactttactgcgcatccgagaacgagaagaagataacaggtcaggccggcaatcgagccgttctagcaaggcaatgccatacgaaatcacgatggaatttatgaatccagacgaattgcatcaaatccggtactcagcgttctttgatttcacacatatgtctccggtgaactggagggtcggacatcgtgcaagacacgcttagtgtagaacagagcgtgaagtgatacggagaacttctttggctacaactttcagactactacaacggtgcttcgcggtcatttctgtaaaatcaagctgttactgcctggggtacgtcatatccggtgatgacgggtggggggttccaatacggatcgttcatgtgtgacagcaagtcgacggagaacctgtcaaccatgcgggctgttcagcatcagtcgatcaggaatctcgttgcagacaacgtaccaatcgtgggactcttgtaagagggcatcgattgtgagcgagtcgtcaaagccgaccagatcaagatccgcctagaaatgctgggtcggtaagtctgcagacagtgagacaccgagcccacttacggaaaagtcagggacttgattaccagcctgatgtagcctagccgtcaaatcgtctgcggtgatctcggtacgtcctgggatcggtgagttttcgcgcgatgcaactcgcgttggcgcgaccgacgagatgcgcaggaggctggcgaaaaacttggcctgataaaaggccgtgttctgaccgcgcgcaaagctcttgcattcccgtgccatgtcgcggaacaccatttggacctgttcaagagtggaggggtccatcctgtgcatgtgctgcggatgtgaagaaggcagaacgattagtgggtgcaagtacgcgagtccgtatacgcccatggcttaccctagcgagaaagaccccagcctgcgcggcacggaaggtgatgatatccggcgcaaacaggatgacctcgttcggactgaggtcggttatgatatatcggagcatctggacagcgagagatatcgttcttccgagtgcgcgaatgttctcgtgatatggcaggaaccggcgactgaattcttcgtattcgaattcaaagttgattccgtaaaagacgcaaatggctctggaaattgggtgcagttcgccaggagctaattgacacgggctatgaatcagatcgaccagcggagaggttgcacagcaacactcacggttgggtccgaaccacagatcgcgccatgtttgatgttctcgattggcattgtacaggatgtacttgaagctcatgccttgagacggggtagccatcggatccgggttgagtttgattgtgttcagcagttcggacagatcgccatgcatggacgaacacgccagcatgacatcggcgtagcagtagatttcgggatggtcctcgcaccattctcgggtcgaatggatcgcgccggggagaaccatacggtggccacgaccgtgcagcaggaacatcctggtgattgaggtgatggaagtctgagcaaaggcagtatgtcgagcagcacaaatcgactcacgttcgatcaaaagccgttagctgcctaaatgttcgctctccgttctgtacacgttctagtatgtcagtccgggcaatattcgattttggagtctgaacatacgagaatctctctagcctggaattcatccccgggcaacggggttttgcgtggtgtatcgagaccaagctcgagtgcgaccctgtgagatacagtcagatgacgttagaaatcggttgcctaggaacgccttctgcaggaaaccgagtggcacccacctaatggcataaccgacgcgtaaccaggtagccttgtcgttggcctctttccacacgctcagcatgcttaaagcttggcacatgccgatgtgcgcatcgccacgggcgaaagcgatccccagcatgtcagttgctcgcttcctgagcggcttgtaaatttctgggagatacacctgagcagcgaccgcgaggacagcggtaaacaggatgggcgaggtccgcaagcagtactccggggtatgtaataccggatccaacagagcgagataggtattgagcctcgaatgatattgctcaaagaggaaaggtacgtcgaccggggcgacgagtccgagcgtgacgggatcctccattccttctaacggctgttcgtcgggcataccatttaagtccggcaagatctctgacgaaccgcggggtctcccggtgtacccgttatgcgccggtccgagggcctcctcggtcccgctggctaaagaccccctcgctcgctcataagccgcttgcgtctcgtggcgtttccgattagcgtccatctgaacctgatcgtcccatctcattcttttccgtggtcgaaccggctcgtcatacaatctcggatcgtcatcctcggcgcccaacgtggcgcgtcgacctgtcggccgtccgtccttgtccacggccgtagtgtaagcggaatgggaatccctatgcaatgacgcgtacccatgactgtgcggcgagtcgtcgtaccggtcgtcctcgctcggccggcggtcctgttccctcgacccgtaatcacgctctatcaatctcccgtccctccgatccctctctgcgctgataggtgtacctccgatcatcatcggcccgttggcgtccttgctcatgacctccaacatggtcgtcaatgccatcggatatagttgtttccctcctggaggtggagaccctcgattccggcaggtcgtactactctgccggcgtttgttcccaccaacattaccattcccgttcagaccgggcggcaagaggttgggcgaaaaggtcgtcgactcgtgctgggagtaggcccggctcgaaggggtcgatccgtgtgggaccgagacgtcgccagtccccggtagtcgaacgtgggcggacgaggccgacgaggcgtttgtcagaggcaactttgacgcgattctaccttccgtaccgatcgaggccccaatatagcttcccgggtctagtggatctagaggggttgacctgttctggtgggtgcgaggaagtgattgtcgagcgtgatgatcccctagtacgaccctatcagccaggtccagcgagctcgccgtcgccaagccggtcgacccgaccgaatggggtggcaagaacgcgttcgccccgagtccgagtccgaaccctgatggaccgtaccccgacgatgccgacgtcgggggtcctccaagtgatggcacgatactcgtagggtcgatgggcgacatggcaaaattggtgaggaccgggtcgatctcgcccagcccggtcattcctgacggatgagacgaaccgggcggcaagggttgttgaagccgttgccgagaagtcgaggcggtatcaaaatcagaccagctgaaagttggcggatgaagagccggtcgggagggtcgtgtggacgtcctatcgagcgtcacctccccatcctccgatccagatccagatccgtccgacccatcctcggattcatatgctccatccccaggacgaggtagagactgttgcacttgctgtaccttgaccttgacttgcccctgtgaatccccagtcaccccaccccccctctttctcggtttcttcaccacgggagtcgcgaggaccggagctaccccagctccacccgtcccgacgttctcgacgagcttgaccccctcgacgctgaccttgccgttcttgcccaataccggctgttcctgcctctcttgtcctggtttcacgggtcgtcgtttaggtttgtagatacagtccaaggagagccggctacatcgtttacacgggtccaggggtgccgagtcggagtttgcgaacaggcaacggagctgggggtggatgtcggagcaaaggccggaggagaggcggggagcaggaatggtcgagtgcgcatgatgaggggcgaaaaattccacaggcgtcagtcaaatcaacatcaggatcgctcggccatagcaaccccaagcaaatagccggtgtagaggctgagaggggggactgaccttgatattccgacaggccatacaagcgatcttccgcttgaccggggcatcatccccgtccttgtcatcccctacgacggaatttgccgtactatgttcccccgtctgtacatcccgatcgtaagccggatgttgatacccggcagtagtagaatcgtcctcttgtttcaaactcggagatccggaatctctacctgggtcggaagagaggacgttgggatgattgatcccggaattactggtcgtacgtcgggcggtcgatggggtcctcgaggaagacatgatgttcgccctggtcgacgacttttgaaacagagacagaggtcgacgtagtagagtacgtacgcgatgccgaccctggctctaggatccgttgtcgagcgagagcgagagcgagaggggtggggccaactccgatgcacgggggatctaaacgaaagggaccgtttctcttgtcctgttcggtgggtgtaacgtgatcggtgtggcagagtgcagggcgatgcgtttgtagaatggggtgtgttggttgttccagaccgagaaggctgttgtcgggatatttgcggtgagcttgctctgtgtgggaatgccgatctcgggcgagagagagatgctgacagcggcgatggcgacgacgttgaaaacgatcgaatcgcgatcagaatccttgaacgttaagaactcgacgtgatgcacttgtgcagtcggtatccgagagatcaagagggagtacgggttgaatgaggtctgaatcgatgggatcgagtaagggtagctagatggtgaaatggtcgccacaccacctgggacaacgccgaccaaccgcaagaaagacgcgcaagtaacaaccaacgtgcagagtacgtagtactgtaacagcgcaactgacgagtatcgatgacccatgtcatgtcaccatcaccatcctaccagatcactggtttattattgggttctcgtaactactgacatcgtacgcatctcttttttattgattactgcaatgatgctcaaaggacaaggcgtaacggatactcgacgacgaatgggaatccccgcgtcacattctcccctacctgacccagcgaccttttagacggcgacggctttaggcgcattattgttgatgatgggcacagtgattcgactcgcgtcggctccctcttggtactatctcaaacacgagcgagacggttttggcatcagtacgatcgatcctcctctcgagatctacatggaacagcggcatcagggcttacccagtgggccgggacgatctcgcccaggttcctcataaagatcttggccacactataccatagtccggtcagtctatcagcctcgtccctctcgagccgtatgtaaccgatgcacgaacgccacaggcgctcctctccgactcacagcttggtggtcccctcgctaacctgtgcgacctcgctgacttgcttcaacgaaggcggcaacccgaacaaggtgatgatgaaccagatcgctcccgccgctaccgaaatgggcgacctcccgtcgacgatcccgctcgtcccggcaaacgccctctcgatgatctctttggcgttcccatcgtccttgggacccaacccgagtctcgaacagaaacggggcaacaggtccgccgcggcttgtgagggcagggccgtctttgaaatgacggtgtggtgctttcccgagatgagatcggcacgccattgttccgagatggccttgacgctgtaacccagatccttcttcctgatctggcagacgtcgcacacttccttcatcgtacgcgacagtcggttctccttgcacgccaggtagatgcaagtccccgcgacggcatccgctcctcgagctccacgtgcaaacttgtgcttgttctgctccatcagacggacctcttccactcgcaaaaagatctgcttggccgtatcgacaatgaccctcgacgtgagctgcatcttggcgcagtattcttcaatcttgtcgaaccccgtatcccgacgcccggcgatcccagacccgatgacggctcgctgcgtcttttgcaacgtccgagcgataccggtctgaccgtcacgaaagttgatctcggtgctaaaatcttcgatgccttcgagcgcttgactgtgagaaggtccggctccgacacgggattgatcgggaccttcgtcgttggcaaaggtctggaccgggacatcacggcgtcaaccgcttgaacccgcaactgggaatgcaacggggtactcactcgccctgatggagacaacagggaacgatcagtcaagactcgggactgtgtatccgggatgcctgtacttacattcgctcctcgtatcgaccaccctgtcgcccaggaccaacccacaatccgcacaaacctgaaacgacctcggcagtgtcagcctgagcttcgtaccacactacaaggcatgaccgctcagcactgaccagatccccgttagcagtctcttcgacaatgttgggaggatcgatcttgcaattcttgcatgtcaacctcacattcaagtcttgtcgaaagggttgctaaaccggatcgacgggtcagccggggtcatcgcaacctacatctcaccaccagtcaattctcgactacgatcggctgcacacacacaccttggtagtagtgcctgggagggcgccatttccaaagacctggttccaacccgaagcggcgagcgaagagctcgtcaccgactgggccatggccttgcgtgcgatggcgttcgccatggtgggcggtcgatcagtactatcgagctattcgtagcgagtcacggagaaatcagcccagcgtcgattgacaacgtggagcacggcgattcgttcagtcggtggcgagagatggctcgagtccagaggcaaaaaggctcagcagaatgaatcgatcgatcgcgagcggacgtctctggtatagcggacgtgcgacatgttcatttcatctcatttctcttcattcgcattgatcggcggtacacttactcggaacgacgtcagagccgacgggttgtcctgtatcctgcgtatgcgggacgacggattcgtctttcggctctccggttcgagttaaaacagtcggataaagggggacgagatggacgctgatgtattcgaccgatacgagtcgaatgctcagattgttcttcttgggctcctttgtgtgaccgagtgaaggtacaagtgcaaacgaatgccttgcagaaggaaaagtctagctgtggcgaaaggtgaagagaagtagatgattcgattcatctagaagtgcccacggcaagggagttgggggatggcaggtcttatcaattaaaggttgacccacaatgacacgtcattaactgatgcacacaagtttgcagacgaagtcatggtcgtcgaaccgcttcgtctatgagtaccgtttaaccgtttcctgccgaatactagctcctagcgctcgagtacaaccctgtccttcgtggctctgttgcgattgcaggtcgaacagatcgtgatgaacgtgtatgcgcgtggtcacatcgatatctcttgtccgaaaccggcgacaactaggaaatcgaccggtgcgtcatcacagttacgctcgactcgatggtcatcatgtcattctgcttgctagacgtgtggttatcaatatagctgagctagagctagctatgatacacgttgaacgccgacatcgaagtccatcgctatgcctggtcgcctatgcggcgccgcgacttctctagctcgcgtacgtgccaagatctgattctccctaaaaagccagatacgtcgagtttaagaagcactcttcattaccgcggttgtcttcacacttcgaacgtactgcatgatattatccctgtcttcgtcaccgaaatcgcttaggctctcccatatctgctcaaattcaacatcgataggatccacaacaatgtgctcggcgagaatcggaccttccgttcgcttttcttctgaactcctcgtcctgcctgtttccgagggagaagcaggggatgtcaccgttgacgatgcgaccgaattcgatggtgccgatgctgctccggtagtcgaccccggagcaagacccgcaccagctcgtaatttgctgaccccgcccgcggccggtcgatcgtgcccgttcgagttcaaaggcacgaccgagccgactccgggaatcggtaagacccacataccctccctcaaacgtttatgccgttcccgatcttcctccatccgacgcagagtgtcgttacgggaaaagttggtcagcgaggaaggatgaggccttttcttggcgttgggcgtattcgtcacgctggcaggatccggggcgagcatcggtctacagcaggcgagtcatgagatacagttcttgttagcgaaaatacctaaagagatgtcaggaggccatgatgcggcgacttacgctgttcgccgtttttcaagcttttccacgagctcatcgcacacatctcccgggatcgtccgtttattccggaatgactcgacgatctgaagggtagaacaatatgagccaggaattctccagaattgctgcctatgcgagtccacaaacgagctccctcacttgtttggcactgagcaagttcaagatcccctctttgctttctggaacgaccaggccgaccagcttttctacatcccgattcaagagggccgtgtagggaaaatccgtggtagtcgatgaagaggcggtaggaatgagtgttgatgtcgtctgaggatcacaaagagtgtccaggaagtaaaggatgttgatcctagtatttagcgagccctgcgcgagaggaacccgggtggtattccgtcagatcggccaagcgcggtcagcattgacatcggtaaactcaccttgccgcattcctccacgatacagtcccagagatcttctccgcatttccgtccatacttcaacgcgtacgagacgaccgtctggatggattgctgagatgcgctgagcttgcgcaggagaccgaggaattgaagtcgagcttcgaatggatccagtgacattgcggctggagaagctccgtcttggagaggaggcactggtaaaagtataacaattcaagatgactaccgctgtgtaatgacttttccgacgcatgccaatggagggaactacgagattgattgactctgacgagagcacgatgacctggagagttggagagctgagtggaggtcgttgcccgaagttgatggactcgagctgagactttccgaccttcgactagccgccggtcttactggattgacccaaagtggaaagaccccgctcacacccctccttcatactctgtgttctactatgcaacaaatcaaggtcaacgacgtagttacatatagaagcacgagtttagtttggcagcagagtctcccaaaacctcgggcgatatttcgcaaaaagtcaacaatcggtcgaagacccagtgttcgatctgcgaaggaggcctaaatcgtcgacttttgacctcggttgctcgattttaccaatctgccatcataattgactattccaacatccgtcaagacactgtacatcttcaagccaccttggtggacagaggagcttcaggatgctggacgacctcgtcaggttcatggccgacgaggtggccatggacggatcgctcggtaagtcgtttcggtcaaatgcgacgtgatgatcaaacagggcaaaaaggacctcgaccgggttgggttcgaaccgatacggttcatgcacgatctaccttgctcgtttcgaagcacgatcctcagactttcttcgtctcacttgattgacatgcatcttcgttgttgttccgtcgatccacaggttgctcgccacgtagattcacgtacctcgtctcctctgaaatatctcctatccacaaacgacccgcggccgctccgcctttgaaccccgaccaactggaaaagacggcggcctatgtctggcgtcaggtggtcgagctcgcaggctaccgggtagtagatcgcaaaacggtcaagaggctcctcaacgagacgtcggacctctcaatgaagccgtatagggagaccaaagacaagaaaccgaaatcgaccaagaaggagctcgaagcggccgagtcattcagtgcagtaaacccttctcggatgtcaggcctgaacgagaaacccagggaggctctggccgggagtgtatttgccgagtcggagattggtgacgaggtggataagagggacatgatcaagctgaaagaggcgtacggggagaatgtatgcgtggtagcagagccggcgacgatcaggatggctctgacagggacccgagtaccggtgagtctatagcagcttgtccagacgttttgttggccgtcgaccttgagctgacaatatcttctgttcgtaacgatagaatccaaagttttccgtggtcgtctgtgcggtgatcgagatggtttcccgggcccgagcagccggagtgaccatggtcgatatcgccaatcgagccacccaagcgacggggcggacgggtaaactcgccgctcagaatgctttttacgttgtcaaggtcttggtcgaagcgggtctagtgtacgtaacgagacccttcctggcgcaatgacaagccgagtgctaaatcatcacatttacgatgcatagcgtgaagctcaaaggtatggacgaaaacaggacttccagttctatcattcatacgaaatacctcgagcgaaatcgctcctacaccgctcgcctggagtacctgcaaatccgcagtgggaacaccgatgatggaccccacgaagttcagccaccagcaatggagaagttgggcagtacgatcttgagcattgacaaatcgaccaagttgccggtctttccaccatttggtaccgccgagctcaaaaacaagtggttcatgcgatcgaggttggtggctctactcaggagtgacttgtggcatcatttgatcgagaacagggatctcttggtggctttggtgagcaagactctctctaggctgcccaacaaaagtaaacatgaagctgaatctataaactccggcttgtatgctgcagggattcgagggcaccatccgcaaagctgaccgtaggctcttccaacgctacatcctcggctttataggtgaaggactcttggaacgggtcgtcgtaccaagcacgttcaacaccaagccgcattcgtgtatccggttaaccgagttccggccgaaagaggaagagacattcgaaggcgagcagctaccagaagcatcgatggtcaaagcaaagctaggcgagagttcggacgaagaggacgaggatgaggccgaagaatttgccatggactcgctcgccagcgtccggtcgcaactttacatcccattcgaccatacgctgacgaaagagcatgtcatcatcgagaccatccgctcctcagggtcggaagggatcaacttcgagcagatctacgagcggttgaagtttgatcacaaactgatccaaggcgtgtgcaacaaatttgccagtatcggcttagtattcccacacctttctcattacggcctcttcgatacgacagagagggacttgaggcatacccagctccgatggttcaccacgcgaggatacattacgtattgccaacacatcaacgtagaacctctggtcggatcagagtatatccgagcgcttgataaagcggggcaattcagggatctcacgggtcgtacgttctacacgtccaccgacgcctaccttgcgaagctacgtggtaccttgagcgggacgtatatcaagcggaccaacgtaaaaaatatacccggcaaggaggatgtgccctatttccgaggtcgacccagaaaattcgtcaagattgttgatttcaaccgaactttactaaagagaagcaagggcatcgtacttcacacctcgcctgccattccaaacttgctcctttataataaggcgaccaaaatgttctttgtcgtaccacgcgaacatgtcgaggggaaacaaccgatccccgagccggcggactggaacgaccctaccggcggtgctactggcaagactcaagcgtattggatcgctctcgccgggggcgaggagccacctcctaatccaacgcaagaggatctgcttgctgaaaaggtcaaagtggtgaaagcgatcaagaagcgtggtcggccaaggaaggtcgtcgaacccactcctgaagccttgacggacgcgcaaagcgtaacgcccgatccagcggtgaattctgaggcggatgaaccgccaaagaagaaagcccgtgctgtcaaaccccgtgctgtaaagtcccgcgctgcgaaaccccagcctgctcctcgcgctacacgaagcagagcgatgaagaaagctgaggctgcatctgttcaatcgatgggaaacgcttcctcgtatcctgtccagcatacaaccgaggacgttctgccgttggaaatctcgtcgcaacagcgcttggccgaagatcacttgccgcagtctgcccgagcgcaatctatggaagtcactcaggatcgaccgcacgtcactgcaagtctgccggaagtcttctcagaaacagtttcgaccggggacgacatcatggaaagaaagatcgatcccatgcttcgagagctatcagtagcgcccgtttcgatgccattcaatgccgcttctcccgtagccaccgagattcccggcgaactggtcattcctgccgacccaactaacgcaagtgccccgtcgagacccaaacctgctcgcgccgggccgtcggacccaaacacagagcgacccaagaagcgcgctcgaatcgaccataatctcgaaatgcagctgagagaggtgttgcgttatatcgacgagcaaggcggcattgttcaaggaaagtatgcccttgcaatgggtcttggagattggacgaccaaagctgcaacagccagtggacaagcgtccgatcaagctatccgtggcaagatcgatggcagaaggcttaccaatatgatcgacgtgctcgagacatcgggcaggatctgtcggacgaccgtcgtttgccacaattctcactcgacggacaaaacgtttcaggtgatatggctcccggaccagccagaagaacaagtggacgaatacatcaaggagctcagccggtccggaatacagagggtcaggccggcccctgctcttcaggaggcagtgccagctgatgcgctgggcttctcaagggcgacccgggcacctcgtccaccagcccatttgcgttatgatcaagtttcgtctctgctcatcgccaatgctacacccgaacaattgcacgggctggatcccgaggagtcgagaaacgcgtttcgacaggattggcgactgtatcctcagcagtacggttgggagcctggtgtcgctcgtcgcctcgagctgctccatcgactcctttgcgatgccggccgtgcacatggtcaagcggtcgacaatggtatttgcgtaaggagaaacgacttcctgaggcaactgtcggtcagcacgacgtgcaaacttatgcctatcaaggacagcaacgaagagctatttgcgatcgttaaatcgggagaagctgcccggacgacgatcgggcaacttaccggtggtctggctgacctgctctcggtcacggctcctcgcatgaggaccaaatttgagaatattctcaaacatcttgtaaccatgggcctcgcgcaaccacgcgaaaaggtccttggagaacacgatgtcttcctcccaacaaccctcgaacggagcaatttcatatggttggcgcaatccggatcgataatcgactggacgaaagcaaagaaggataaggccaaggggatccccagttcaatcacgtgttggaacatacccttgcagagtgctgaagacgtcaacacgttttggtatctgacctggtaccgaacgacccctggtgacgcggaagacgtcaaagccagccacgtcgtccagatcctcaccgaggcaggacgtccacacgagcagagtgaatccattttcaatcacaccgattcgcttgctaatcaactcagcgtggctcgcgcttggcgcaaggggttcgttttgcaagatacacaacagcgttacctgcaatggcttgttgaaaacgatcatgttcccgaaaatctgcaagaccatccagaatatccgcaagagatcgcacatcggatctttgctcctctgcagcccacgagaaggtacctccaaagccgtgtctctcgtcactgtttgcaccaacagagggaggctaaaaaggcggaggagcgccaagccgacgaagccttgagagaatcgatcagaaagaagattgaggagcgacagatcgcacgggaggcgagctgggtggaactcctcgacaaagcctgcatccgggtcggcatcggtagtagcgaagaactggtcaaataccttggagctttccaccgccgatatcttcgggaccctgtgtcttttaatacgacccaattcttcgacgtcgtcagcaactacgtttcaggtctgaaacaactcaagaagcctactacccggtccaccctagtatctagcgtaactcccgtagtgaagacatctcgagtgaggttacactggacacggcagatggaagagcttgcacgggatgcattcgtcgtgatcgagcatcgccgcaagcatgtaccagacgatgcggttaacaaagcgaccattgcaagcgcttggggcaaagtgttccctcatgttcagccctacaaagtccgccgcaaggtcaccgactggatggcagagtcggcagccaacgcggagttcatgaagcagttgaccctccagtgggaacatatacaggtcaatcttcactcagatgacctcatcgacccggatccttccagcttggaacactttgaggtgctcgcgaacatcgatcttttgcggctcaacgtgaaaaagaacgcattgtgagtcatacagcccgcgtgtaccctgctgtctaccgagaccgaccgatcttgccctaactcgcagactgcaacgagcgcgggacccagaagagggcgatgcagagtttctacacgcgttgcctcgttctctggaagttttgaacgcgatgtttgtccaggacgaaacatctgcagttcgcgtcgacaacggtttccaggcatactggttgggcaggaccagcgaaatgtccaaagagcgtgatgtagtcgcgcaaagcgcgctcttgtctatgggaaaatctggtataagaatcagtcccaacaaggaggatgtcaagctggaagccgcggccaaggtatgttctcacgccgtcgagtcgactaatgtctgctcacgaaacgtttctggcagactatcatctcaacgccctcagccggctatcgagaggatcaagcggacattctgctgcagaattttaccacgagaaaggcagacttcaagtaccgacggatgcttaaagaacaggtcttcacgcgagcagacaagtctgtcacgactggccgagggttccgctttgccgagccgtgagtatcagcagatgagctctcgggaacgcgcttagctgatgtgctccctccacacagctatgtagctcttcgagagacgccacttgcaccgacgatctttgaagattgtctcggtgccaaggacattcaacttggagaatacgtcgagtggaatcccatctgtcagccaggcgaagttgccggtttcctcgagctagtttcggacggcaagatttcgatcgcgctggagacgcaaacggtcagcgagattctcgaaggctgggctcaatcttatggggcctcgagaaaaattggtgagccccgttgatatttctgagcgcggctgtatcttgtgcttacctggcttctggcttcacagatgatgaggacatcgaattggactttgcgttccgcaagaccgatcaggtggtacctcaaatcctcgctgagaacgactccgatctctgcgccgcaccgatcgaaatcgagtcgatggatattgataagaccagcgctacaatggaccctgacgccaagacgatgctcgctcttgtcgaagaagctggcgatgacggaatggccattgaagacttattggcacagtgcaagacctccgagtctccgtccgacgcgatggtgttggcgatgaaactggtccagatgggcaaggtgtcttgcctcggttggtcccatgcccggctcgttcatgctgaccacttgtcagcctggaagtcggtctttgggagcagaaaagcaccggtgccgatgatcgaagacggcctcatcaagccgaaaagagccgaggataaggatcacgccgtcaagttgccgtatcagtggcttgatatctatggcgagttgaacgaggacgagctgagggtcgcaatgaacggcatgatggcgcacatctacatgcgtcccggcgtcaacgaggtgagtgacattatgactatcctcgcgatgccaacctgaccttgcgctttttcgcagagcgttcttcgaagcgtcgtatccaagctctttagccgtctagagttcaatttcctcatccaatctctcttggatcgcggacaaattcgtcgcttctgcggcgacgccaacatctcgccccgactcgcattgccggtcgtcgggctggccaccatcgaggacgaaaagttcatcagctacatgtcagatgggatcatgaaacacatttaacgaccatggattgacgagcgccttgtagaacagccattacgaacttgaacgagacggaacgtagttgtatatgtaccaatccggcctgcaacaagtcaacgaatcaagagagaaagcgagtcggaatgttcggtctatatatgacatgcgattcctgcaggttgcgttaaaaatgggaggatacaacatcaaagagggacagaaagagggagcacggtcgaacggatttggccgtgttcagtaggaacaagcatcctagaccgaggtatccatcgacccgctcgcctttttagccttttgcgacgaataaaactcgtcaatcaccgaaggccaggcccctgtgacacgtgattcgacatggacgaagcgtgtcagcatcacgttcgagaggggcaatgcgacgaccccgtctggaggactatacgatcgatctcgtgaactcaccctcttcatcgtaattggcgtaatccgggtcgatggtcctgacgaaatcgacaaacaagccccaaacgtccttgctgaccggtttcccccgagccttcataaactcgagccaatcgtccaggtcggtgaaggtcgaattcgtggtcgctcccgtgttggggtccgtgatatgggacaatgccgagggagtggcggcgagcgctggagggaaaaagacttgccaaaacgagatcgctgtgggtgtatgatgaggcgaggcgaggcagtgtggggcgggcgggacgagtggcagggatcacatcaataatcccttttctcgagacgaggaccacccgagagctagaccgcgaactcaccgctatcgagcgccaagacgcgagctccaggctgcaagctcatcgtaaacgcatgcccgtagacctttttgaaatagtctggattctcgtttaatttcttccgaagccgagggagtgcggctttcatccccgccaacgactcgacgctgtcgaatgtggacgatcgggcaagaggagcggaacgaatgcacggggcgggggggcgcttggtgtgatcagtaccaggtcgagctggacgacgaagcaagggaccaggctaggacgaggtcgactcacgaagaatcgatcgtccgccatcctttgatccatccgtccttgggccattcaccgaccgacttgcttcccagatccgccgctagacagaagaggatcgggtcctgcgtcgtcgtcgagacgatacgtgtcgtttttttttcacgtcaagaggtcgaggtgagggccgagcagagtgagccatatgaagaaaagaacgagatgaaggccaggtcgagtcgagtcgattcgaatcgaataccatcagccccgagagaacgagagtcacaacattggggattgacgacgacggatgctcacgttctcagggtcaacctcgagatcctcgcacaatttcatcgttccctcgatagtgatcaacgggggcgaagaagtcgcatctatcccccccacccggtacacagtcaaggaatgcgtcgagttcaaggaatcgagatcgagttcaaggtcgaggttgaagctgatcagcctccccgatcgagttcaagaggacgacggacctacctttatacccttcccaaatttcaccgagcttcttctcgacgttcttgcccgtcgtcgtcgagctggaagaggacgagagttgggaggtgatagcggcttgttgggcggctgggtcggagtaaaagtggtcgatcgcctgatgagggtcggggtcaggtccagggggagtgggggaagagtgaagagagggaaatggatggaatgaatggataggcgaagaggtggagaccggggggtttatgaaggtaacgagggcggggttattatcgtttgttagtcacgacgattggaagcgaatggaaaggcaaataaatgggtagagatgagcgggatagaatcgtcaagggaacaacatatcaacctcggacccacccgttctagattatagttggcctttttcaacaactttgaagcgtcccccggactacatcgtcgacatcggtatcgtcatcatcgtcgcccgaaatgtaacatgatcgatcggtcgaccggcaggagggagactcacgtcgcaccggtgatgctccggagttgagtcgcgagcgcttccttttcctttgtagacttgctcgagctcttctgacgttgaaagtggaggtgagaatgagcgttgagcgacggcagaacaggcgagagtgagaataacttgtctggaatgcttaccatgatgttgttgtggataggggatggtaagtgatgatggtttggtcaagtagacagacagttcattttgttcagttcaattccaagtcgtcatcatctagcaagtagttacgccaaggcgagggcgcgagggctggcggttgacgagaacgcggacattgaaaacagatgtatatattctgatgtccgctgttcagaaatagcttccgaccatttcccgtaattacttccgatccacggcggattcaaaattaattcctcaaaccactcgcaagagcaagagatcgagcaattaatgcaggttgatgcacagtatgatcttgcaacaagctgcaaacaagttcatcagatcatcacagccagccacaaccctcgatcgtcagagggacaatcgtcgtaaagacctatagacacttgacggcatggacgacggtatcgagctcaatttcgcaactccttcagcaggaggtagcggtagagtcgaaaagaagaaacaaggcggacgatggacagataggtacggctctcgttcacaccccacttcgaatacgagacagaactgatctctcgtggtgatatggaaaaacccacacaggctcaaggcgaacaaggcggccaaacgtaggaccgaaaaggacccagcggacggggtcaaggtgaaaaagacgcccaattatgggacgacaggggtcgtgaccaaaccgcctcaaggtcaaggtcaagctcaagctggtcgtcagggtcaggctcaggctcagtctcaaggccaaagaccccctgcctttcaatcggggaacaacggccgggatgctcctcctcacaaacgtacccgaaccgacgtaacacagtttagcagctcgaacaaccatcccatccagaaccctcggtccaacaacggctcgggctcgaaagacgatttcgccaacgtcgatatcgccgcgctcgctcgtcggagcacgacctcttccaaccagcaacaacagcaacaacaacagggtggatcgtcttatcgacccggagctggagcttcgtatcaaccccgtcaatcgggacagggaacgtcgggtggggtcgtctcggggttgttcacggggatgaacaataatcaccgtggtggcgagacggatgaggtcgagatggacgacgagcaggataacgaggggatggaccgtatggatcggaggttacacttgaacgcctcgaacgctccggatgtcgagacgacgctaaacaacgccgagcacacgggggtcaaggatgaccggacgttcgagggtctggggttagaccccctcttggtggaacacttgcaaaccaagatgggaattcaacgacccacccggatccagagggtcgccctcaaaggtctcttagaccccaccccgctcaccctgggcgtagaaccctcgaggttctccctcacggaacacgcggggaggaagctcaccacccctcgcgacgcgttcatccagtcgcaaaccggatcaggaaagacgctcagttacctcctcccgatcatacagaccctcttgccgctcgcctcgtccaaagacgtggggtacgtagataggtctataggcaccctagggatcgtcttggccccgacgagggagttggctaggcagatctggggcgtcacggagaggatcttgggcatgcggttgagcaccgtcttggatgacgaggcgaggacgatgaagcacgtcgatggaggggtcgtacaggaggacgggtcgttgcccgccgagaaagacggtgacgacgacgccgatggcgaggtcgaggtcgaggtcgagaggaggaaacccgtctaccagaggttcttggtcacgaccctcttgaccggaggatccacccggacacacgaaaagagtcgattgcgaaagggatgcccgatcttgatctcgacgcccggtcgattgctggaccatcttcaaaacacggcctcgttcaaggtggaccggttgttatggctcgtcctggacgaagccgatcgactgatcgaggaaggattcggcgagacgttggaagggatcatgaaggccatcgagggcagacgaaggatcgggatcgagatggatggacaaggactgggaaggagcaagaagaagaagtttgtccctggaaagacgatgaacaaggtcaaggcgccattcgagttggatgacgaggacgaggacgaagacgacaacgaggacgacgagtgggattacgagttgtctggacctaaacctagcgcgaaaaagacgtctttcgatccggacggatccgtagtcaaggaggaactcgccgcgatggtcgccgggaccaacgtctcgacccagatgaattggccgtactggggtctcggaagacggacaatcttgtgttcggcgacggtctccggagaagttcaaaagcttgcaggaaccgccctcaagaacccgatcatgtaccgcgcttcagacgccggcaagatcgacgatgaagagcaggaagacgaggaggagcccgagctcaaggatctcgcccaggtcggaactggacaggggcaaaagaagggagaagacatcccggaagagcctgaacaggaaccggaagaggagatccaggtcgtcggcaagggcgcagacaagtttacgcctccttctcaactggaccagaggtatatgatcgtacccctcaaactccgattggtcaccctcgtctcgctgctacgaaccttgatcgccaagggtaacatcggtggccccgcgggtcaagggatgaaggtcattgtgtttatgagctgtaccgattcggtcgatttccattggaaattgatgggtggcgtgcaaatgggtgctccgcccaaacccgaaggcgacgaggacgaggatgaagaagacgaggacgcgatcaagcaaaagaagaagaaggaaaaagcgaaaaaggagcaggatcctatctcgtatacttgcccgctcctgccgtcgacgtcgatcatgcgattgcacggttccttgcccctccagacccgacgagagtcgctccaggcgtttgccaacgcgaccacggccgaggacgcgagcaagcattcgatcttgttctgtacttcggtcgcctcgcgtggtctcgatttgcccttggttcgggccgtcatccagtacgatctgccgaccgaacaggggatcgccgagtacgtccatagggtcggacgaacggctcgtgtcggaaagggaggagagagttgggcgtttgtagagaacgcagaaaaggactgggtgccttgggtcagagacggtatgagctcgaacgaaaaggacggcggcaaggtcaagatgaggcaggtcgtcgtcgaggatgtgctcaagcggggtttctcgcctcgaggaggcagcgcggatagccgagagtttgagcagagggcgacgcaggttcagctggcctttgagcgatgggtcctggacagcaactcggtcagtggtttgctccagctccccgtcttgtcgacaacatgcttacctcgcctcctgacttgctcgcagaatgctaccttggctcgacaggcattctcgtcctacgtacgagcatactcgacacatcctcacgaggaaaagcgcttcttccacgtcaagaacttgcatctcgggcatctcgccaagtcattcggtctccgtgagacgccaggcaagatcggaggaggaggcggaagcaagaagaaggatgtcaagggcggcaagcgaaagcgaggcgacgctgacagcagcgaagacgatcaggaagctgaagaggctgaaatccgagccgccgccgcgggtggcaagtcgtccgcggccaagacagacatcgagaagaggatgtacgccgccgtcaggaagcaaggacgtttgaccagggtcgacggcaagatggcagctggaggcggagatgccgaataccaggtggcactgagcggaagggatctcgaaaagatggtcgctggcgacaggggcggcgggttcggcaagggcaagggcaggaagggtcgatgatgcggagaaaagaggtcgcaacgttgtatcggattatgtttcgttgtgtttgcatatctttcatacatggtaccggtcaaacgtcgaggcgggataggtcagatcgacggtgaagtagatgtggtatgatggtataggtggttacatttcctttcggactaattggatacagtgtgtacgttcggaatacagtggacaacaaataaaacaagagcgaaaagaaaacaagaacttttgagaggtgggggaatctcgtactcgactctcaatatcgacgccgcaatgacgatgcacatcctctgcccttacctttccgcgctccatactcttcgacgacttgctaccctgtccatcccgactccggaagacgactcaaggtccagtacttgtctgatttgaatgcaagcggtgccgaacgagcgtgtttccttcgtagctgatggggtccggcggctgtgaagacgaagaggtccggagtttggaaaaggcgcgagcgggagggagtgatctgcggtgagaactgtgagagtgacattgtacttggtagttgggaggcgtgaggggagttaagagaatataaaacgtaaagagcgaaaaataaaagtaatatgatccgggccggctggtcgaagttgcgatcaacgcgagctttaaaaccagacggtaccggggggcaatacgcggtcaacgcgcttgccgggggcgagcgagaccctgttcttcatggacaccttggccttggtaggttcgatgacgacgttggtttgagccttaggctgagcgggagcgacagtcgctcggagcggtgctcgcgccttaggcttggttggcccaagggacgctcggttggtactggtcaccttggccttgggcgcggcgacttgaggcgctggaggttgagccggagcgacggtgggctcgagtggtgctcgtgctcgaggcttggtaggtgcgagcgatacgcggttgttgacgctgaccttggccttagggggctcgatgacaagggcagcggaggcgacggtagctcgcggttgaggagcgagagactgtcggttggtggtggtcaccttggccttaggagcttgagtgacgggagcgacggtggcaacgggggcgactgcagctcggggcttgacagaagccagagattgtcggtcgttggggttcaccttagaactaggcgcctcagctcggatgttagtgggagcgagggattgtcggttggcggtggtgaccttaaccttagtagtggtggcggcggtagtagtcttagacttaatgctgttggtggtggtggcgaccgcccgggccttagtgacgggctgaaccggagcggcagtggcgacggtgacagctttggtggtcttcttctcgatcgcaatgaggacgggagcgggaagaggggcggaagcccggatggaagccatcctcgctcgctcgatcaagagagcttcgacggcggcgcaagagctcttgtcggagaactccacggtcaagtcccattcggtccagtcgaaggtgaagtccttgaccttctcttgacccttgccccaagagggcctaggcatacagccactacaaagacaaaggaaaaaatggaggtcagcccggttcggtctaagtatgaaagcggacgtgggagactcactcctcgtcgatgactgcagcaacgggcttgacagtgacttcggtagaggccttgacggcgacttgtacggcgacctccatgggagagacgaccgaatcgaccgcgagactaagcaacaaaatgaatgagtggtcagcccgaatccgacggtgaccggggtaacgacggtcacgccacttaccgttcgttagaagcagcagacttcaacacggcatcctccgggagatcagaaagagagaggttgaccagcagctcctcgtcgtcatcggcatcggggagtacgaacgacgcactgcaaacgtagtgatatcgtcagcccgaaactcgcgatggtcggaattggcgaaacgcttctacttactcggcgtcgagttcgaaatcgagttccatacccgggggagggcactctgtgagaagcgaaggaaagataacgtctgaaaaaaagaggatgtcgtctgagagggggttcagagcggggctggagaagacaaaagaagtaaaagagttcattttcggttgtttttgagggaagacttagtggtttgtaaaagctttgaagcggcagacaaaagtatctcagattgaagtattctagaggtacgatgaagaagaagagacaagttgacgaaaagtaggtaggtgatgtggatgaaggtcgtcaagtcgatctagacggggagggggagagtcgagggtcgagggggtaagggaattgcgcgtctgggcgatgagtcgaatcatctttccacatcaagggcgacgcgttgttttcgtgttgtgttgaaaggcaaggctgactctataaggtggctgacaggttggttcattgtccacggtggcaggatgttgtgatgttgtggtgttcatcgtcgagaaggttgtttgttgaatatcgatatggtctaggtcaatctgggccgagcccgacgtcggttcggtcatcgggcggaagcaaatccgagagagatgtcacgcgagaagcgccaaagaaattagcttccgccgtcggatccggttgaaactagcttcccaattcgaccgtcatatcgataattattcgtcaacgagacctggcgattcactcgaaccggtaagtggtagaatttgggaacactgagttcatgatatcgttacaagcggaaaaccccatacgatacaatagcaaagacatcgatgacggatgtgagaggcaaaaaagtggggctgaagcagtgacctagaacaaccaccgagtcaaacgatggtaccacttgtgtccaatctccttgtccaacccaagctttgcgagctcttcttcgtgttcctctatctcctccaacccttcaaatagctgggcttctgaagatttcacccagcgcttacggtgtaccgctttccagccgataaaggcgagcacgaaaatgatgggcgcggcgtaggcaaagatgctagcgcaagggggagcaaggcgaaggtaagcacgcatgatttcgaccgtctgcgttctagtgagactagacctacaagtcgggagtggaccagtttcctttcaaaaagacgctgtatccgttgataagcaagacgacggatgaaacggccagagcataccaagccgcataaggctgtaatcgtgatctgtacggcatatcgtccatcgagacgccctggactttgcaagccttgtggaaacgaatgaaggtgacgctcatcgccatccaggtgacaatctggctcgaagtcgagatgttgatgaaccagtcaagcacgacggtggaaccagccgagacttgaaggaaggagaggcacatgacgccgagtacgaccaggacggttcggtgagggacaccgttcttgttggtcttgcgcaggaaccttggcgcgtagccgtcaagggatagaccactgcgatgaaagtggatcagatcttgatcacctgaaattggcgagaggaagctagaacttactgcaaagtcctcgacgctccgaacaggaaggcggatccactagtgagtaccaataggcccagtcagccctgcgcgccaacccagcgcatatgacggcgcccgactcacgctgaaaagatggaagacgcgatacccgcattaacgatgtgaggcaagacgccaatcttcatcctcgtcatggcagccacgtagggcgactttccggcccccggggctcccgtggcgatagcattcgtcaagatctcatcctcggaaccgacaacgataccgacagcgagagccgaggcgaggaaactggcgcaatcagacaggtgtaggctcagccgacgcatccactccaagtcattcgtcgaaaagacttacaaaatgatgagacggacatagacgctcctaaaagcgcccggcaagacttttcgggggttaatcgcctcggcagactgcaaatagaagccgaatatcgataagttcgatggtccgatgagtacgtaggtctccgcagaaatcactgacgatcaaactgagcatgtcaggtccagctacggcgaaggcggccccaagtaaggccgccgtgaaggagcgcaaaccagcagacggtccggtaccataatatttcgacactgggccgggctccgtccaatacctgaatccataaacgtctttcaggggatttcctccgaccatggtgacaaaggtgaacatgaacagcatgatcatgagaatgatcttgcctacaacgatgaggcgtcaaagctaatcagcggtgaaatgaagagatatggagtccggaggcgtacccaaaacgatccagaattcggactcggcgaaccatcgggaagaccagacgtgtagcgagaagtagacgaccagacagatgcaaggcataatcgccggatgcaactttcgaaaagaccttattcagtacggttctctggacttgatagatcacgctcgcccaactcacatcgtaccagaagccaatcacaccatgcaacgcggtcacctcgaaacagaggagactgcatgtctggatgaaatagttgacacccgttgcgaatccaaaagcctcgtccacgtagctcgtggcaaaacgggtaaaggcggattcacgagcgatacgggagaccatgatcccttgaccttcgttgacacagtagatgacggaacaccagaggatgtaccccaaaaggaggaagaggggtcccgcgcgcactgtggaaacggaaaatccgatcagctacctgggccttgtccccaagcttatccatcaggcgaatagctcacgcagagtagagccgatctgtgaacagtctcaaccgatatcggtcaactcattccactgcgctagccagatattgcttaccgaaacgaagacagctgttccaatggtcccgccgatggcataaaactgaatttggcgggtcgtcatgacccgcttgacggcatagtgcggcgtcgagacggcggcatcgtccaggagaacggcgggctcgacaacgccctcttgaacgtaagcgttgacatcttcctttttgctgtcgtaatcgatcccgttcgacatgttgatcaagggatatgatctttcttgaatgttctgtctagttccttaacccggataatctcgtctgttgcatttcagtactcgctttcgtctaccgtcatatattcataaagggtcatacctcgtagctcgacgctctctctgcttcgcttatacgacaaggtagaaccgacaaatacatccttatcggaccgcccgcgattgtagatgaaagccaagcattaaagtgcagaccgaggtcgaggcgtcatggaagtatatcctgtagaaccagagattaccctccttcccccctcgcccacactttttttttttttaatgatacggcgaccaccgagatctacacctattaagtcgtcggcagcgtcagatgtgtataagagtcagccctcgggctcgatcgcgccttcaacaccaaccacctttggtttcatgacgaggagattgtcacggccacggccagcgaatgaaagaccccccttcgttgtactagtaccctcggccacaagcagtcggccgttttcctctcgtgcttctttatcggtcacgacgagagacagaatcaaatctagatgtctttttccctttgactcgtttggtggcctgatggcatctaatgatgaacctgttcgagtggggggggggttgttgtttcgtcattattgtcgatttttcgattttatgcgttgttcagtatttttcggaagcaaacttgaaatcgaaatcgagccaaagtccagaccgaggttgcgagatttcagagagaatggggtcaggtagggttggttgcacaagtgatcgatcgagacgtcatcctggaacaagtcactacatcgcatctcgttgtcggttcaacagacgacattttcgtcgtttcgagattcccactcggatgctcgttcgacgtctcctggcaccggtcgagaggcaatgtcggatctgctcgctcgagctcgtacgccaacgaagagcctggaccaccgccgctcgtcagctttccaccaccgccatcgtcgacaagcagcaacgagatttcccaggtacgaacagatcggggaatcatgatccttttcacgctcgaggatcgggtcgagtgggggacgatcccaagcggacgggtccttcgatgacgagggggggtccgccaccaagacgatcgaaacgaccgaacaacggtcgattgcccaacgagacgaaacccgcgcccacgttggaacagctacggaacacgctgatacgcaggttggaaccttggatatactcggaggggacgctcaacaagttgggctcgctaggtatcgggatcgagcacgccgaagccctgttgagcgagttccacggggtcgcagggagatcgctcaaggacccgtctttcggagcggtcaaacccgtgacgcccgaccgaacatccttctcgctcgaatgggacgtcgagggcttgacgttgtcgttccaatacgacgccgactggatgaaatcggtcgaaagggcgtaccttcggcagttcttgcgatgggccacgcacgacgagtcgaccgccgtcttttcgctacccgaacccttggtcttgcggatcagggaaatcctcgagacgaccgacctctcccactttgcctcgcaattcaacgaggccagggaaatgcatcgacagttccacttgcacatcggaccgaccaacagtggcaagacgtacaacgcgctcaaggcgttggccaccgccaagacgggagcgtatgccggtccactccggttactcgcacacgaggtctgggagcgcatgaatcgcgggaccgtcggtgggctcgaggacggtcaaggcagggaatgcaacttgatcacgggggaggaacgaaggatagtctccctcgaggcagggttgacgagctgtaccgttgaaatgctgccgttcaacacgtccatggacgtcgtcgtcattgacgagattcaaatgatcggggatccgcaacgaggcggctcgtggaccaacgccgtcatggggctgttggccaaggagatccacctgtgtggagaagaaaccgtcgtacccgtcatccagaaattagtcgcggccatgggcgacgaactgatcattcaccggtacgaacggttgaccccgctcaaggtcctggacgaatcactcggcggggatctctccaaggtcgaagacggcgactgcgtcgtctcattcagtcgatcggggatctttgcattgaaaaagacgatcgaggaaaagcgggggaagcgatgtgccgtggtctatggtgcgcttcccccagagacgaggagtgaacaggcccggttgttcaatgagccaggaaacgggatcgacgtcatggtcgcgagcgatgccgtcggaatgggtctcaacctgtaggtgcatcggccgggcgctagccttatccgatcagaccagctcacattcccatgctacgtcacacccttcataggaagatcaagcggattatctttgacacgctacacaagtggaacggcaaggaagaagtcttgatgtcgttctcgcagatcaagcagattgccggccgagcgggaaggtttggacagcacgacgctgggtccgaaggtggcgtgacgacgctcaacgagcaggatctgccgttgttgcgtcagatcttgccttcaccgctgacgcccgtgccacgggcggccatcgaacccgggtacgatcggttggccaagctggccttgttgttgccggaagagacgccctactcgagcttgttggaaacgtacgagaacctggttcacctctcgccagcttgcatgccttcggcagtgttgcctcacatcaagctctctgaactgctcaaggggttcaccaaggatctcacgctcaaggagatggtgacgtttggtttcgcgcccgtcaacttgcgggacggcaaggtggtctcggcctttcaaaactttgtccgagcgtacgttaccgagggcgaggtcttgctagaatcggctttggagagcggtcgtctcgtgcccaacctggagttggtcgaaaagacgagcaggacgatgcatcacccgacccaaagtgagactcgagccggagccgtccctccgccgatcccctccaccatcgtcaccgccatccctggactagagtcgcttcacaaggcgctcgtgctttacctatggttgtcattcagactcccgctcaactttcccgatcggatgatagcatccgagatcaagacgcggacagaggtcatgctcgacttttgcctcgaacgacttcccggattgaagcgcaagcgggggctcaagtttaatcacaagagggagagcaaggcgattgaacaggagcgactcgaggcgttgccccaaggcgcgctcgaaaagatcaaatggatcccgcgggaaaagttggaaaagatgaggacgcagcaacagtatggcaatttggacgttctccctgacgatagattgtagactagattgtgttcgtttccttgtacacgcacgacctaatgacccgggatactctcccccgatgtatcaatgattgaccgtgatcatcactcatgacctcgagccagccggtcaatcgatgcccgtctaccccatctgtcgaccaatcagaagcgcgtcgttttggcgcgacgagaaccggaaccggaagcaccgagccaaggtcgattcatttcgaaggcatgtaatcagtcaatacatgtcgctatcgagttcggaatccccgctcagaccatccctgcaacctacacaaccggaggaggaggtatcgaaacaaaatgcccgtcccctgggaagctctcattccgttcggtgcgtacacaggttgggtgtccggcacaaccatcgagtcgctgatatcttgacatgtccctcttgacacataggtcttttgaccgccatgttcggtatcaccggtaccggattcaacgtcgccaagaggcttacgaacgacggcaaggtgaggtccctcgtcgagagtcttgacaagatgcgttccggatggctgacatgtgctcctgtacgaatagcctcctcgatacaacttggaccactgggatcagatgatgatgtctcgagacgaacgattgacagggtcgtggagagggcagacggtgagtcacgtccgcaggctgcgtcttcgacaggacctagctgagatgctttcgttgccctgtgtcagtccgagcctgtggcaccaaagtcgtttgcgacgagctcggtttggggaacagaaaaggttcaatagaaaagccggatcttcaatgcccacccagttgtcctttgccttgtatcgatcatgacatgaaatctagcccaacgaccggacaccgacctagcaagaggaaacaggctgtcgtgcttcgagatcgatcgtctacaactgcgtacacggggctcgtaagggaggatacaaaagacgtcgccatcgtgaatcaaaacatgttggccaaactcctcgcggccgctctgtcgtctatacgtcggggtccgccgtaccctcctggtgctttgctacctccaggaatgtacaggctttgagccatgctattgaatgtcgtcgcggtgggtcccgcgccgaggggaggtgggctatgaacgttgcgcggtacgttggagggcgctccgagaggatccgatgggtggttgtattgggcaaactcgggtcgctgagcaggcgcttgcgaatccgatgggtacgccgagtggggttgtgcggggaattgctgacgaggttgggtcggaccggcgtacatgctctgactcatgcctgaaggtggttgcctcgagttgggtggcaagtacccgctcgcgttagaggcgacaaagggttgcgacgggtgatcgaacggttctccgggctgttgctgacgtagtgatgctccttgaacgctgttggtccgttgcatacccgtcgatggtgccgctcgggtcaccttgacccccttgccgatattcttgatgtcgggtcgtacgctctcgagctctttcaagacttgacgttcctgcatgatcttgcttttggcgtgttcgaggagcatgacggcgatgtcttcgtgggcgcgccgagaatggctctggatggctgatcgcaggttcagcgagatgccctgcacgcgttgggccaggtgatggtccaagtcctgggcctgccatgtaggggatgaaccttgtcagcggacgttcacccgggagcccaaatccgcgtactaacctcgcgcatatcctccagtgcgtcgtcgactttggcggggttgatgttggagcttcccttcatacgttcgacgacgcggcgcttgttgatggcagccttggatgcagcctgtgcctcttccagtacatgtgttcgttgattcagcgtttcctgcgaaaagtcgacctcgtcaggttctgcccgggtctctctggcactcgagctgacggtccgagcttaccttggcggatttggcgttcagcgattgatagccaagagagtcgcttaggatgacattatcgctgacggcctgcaagggttggccaacgctctttagatgtggtgatcacacgggcctctgtcgacacgctcgcgactcgcctgagcctgcatcaacccggcgatcgtctcgaacgccctccccatgcttctcatcgcctgtgccaggtccggactgggttccactgtcgagagcgagacaaacttggacccgctgtccgcttcggccacggcaaaggctgtgaaatttggatgtcggcgaggtcagcaatgcgtgggttctcgggtcgagtacgggtatgcgctactcactcctcctggctttgcctagtgaattgacggcgctcgccgctttcgcccatcgttcttcaagcctctcgagctcgcccttggcagcctgcagatcctcgtcctcgtctggtgggcctttgcgaaagaccttggagagcgaggaaaaggcgccggtagatgacgaagcggtggtgcgggctttcatttgagagcgagggatcgagggttgatactgtttcgtgtcggtggaagaagatggtgctgggtgtcagaaatagacgagcgtataaaggccggtggagggacttgccccgaaatcgctctcgacaaagctacgtagctcgtcatcgcgttgaaggattgggtcgtcgcatacccgagcgaaccaccgttgaagggcgatccggacgaggcgatcgtctgccaacccggaagtgtcgttcgagatcagcgactagggtaaggtgagggtgttaacagtgagaagacctcgtactgaccttcttcgtccgtgaccgccgaggtctgtgggagtggtaaagcgggcacgatggctgcgagcgagtctcaagggtcagaccaaatattggcgtgggaccccgaagagctgatccagtcgactgctcactctgtggattacggtaagcgatctgttcggcaaacgtcgtaaagtcggcgtatgatcgttgaatgttgcggtacagtgtagctcggaaggaaggtagattggtctagagttgggagtaagatcgaggtgagctttcggcgacgtcgctcgatgctgtgcaggaattgaatacgtacgctcaggtcaaaccggatcaagaggtcctttttgttcctgtccatcgagcccaatcgtacgcggatgaaaggggtggcaggttggcctcgttccgccgctgttgatgacgagtcgatgagagtgggaccgggtacaccataggttcgaggatctcgttgaaagtcgggcgataccacgtcgttgttgccgttgttcggtgggcgctgaacgtcggtgtcatgggtgggcaccggggggaggtcatccttttgcggtgggagaggactgccccaggcgttcatgctggcgagcgggtcagccatggtcggcagggagtctagaattcggcggtgggaatcaatatccgacaggggggtcgttgtagcaggagtgcatcgacatgcatcatttgcttcttgctcactctcatatgcccatgatgtatctcggtatcgggaccggccgagggttgatcgctcaatcggcagcgccgggttgatgccgtaagcgagtgggtaggcgcgattttttgggcgcaaacgtcacagagcacgggagggcatgcagcctgggacctagacgagctggaacaaaaactgcagctggaaagggtcattagatcagagggccctttcccaagttgcagtctacggcgatagtcattgcgatgattgcgacccgatcgcttggccgaccgaccccgcaaaaagtcaacccgaccctcgcaaaaagatgaatcccctgcgcggctcgaacgcgcgaccccctgatcacaacgatgaatcgatcgtagtcagatattctaccactaaactaaggggaccacttgttgtatgccacactgacgccacttcttcaaccatcgcattgagaacaaggtcacattcttacttctttcgtttccggcgtcgcgtcagcgacgcctcgttttctttgccttcacatgccctaccttgacctgtgcggatacaaccatccgtatatccaacaacgagctcgcatagtgtatcaacgggttgttgcttcagcgacaaaaaaattccgctcgagatgagaaaataccagtcgaacggcttgcaaattgatcgccccaggcactctcctcttatcttcacgtcaggatggacttttgccgtcggtgagatgcaagcgacgagacctttgttgacacggacacgacaggagtccaagcgccaggcttcaagatctttgccgagagtgacccaggatcaacaccatcgcgaacgtcgtttatcgttcgtcgcccatcgtccgtcgtcatgtgaaacacctcacccctcccttctggcctttggcgattacgcgattaccccacaattcaacgccatagcgcgcaacgagcaggggccaacaaaacgggggcttttcttgagggtggatcgtgtcgtcgtcgtcgtcctcgccctcgccctcgttatcagccgaccgcggaagcagaatgaaccggggttctccgacttctactagctgcaggtgatcaggtgaacaaggacgaagcgacgcagacgaccaacatgtcgctatatatacaggcaggctgatcgaggaacgtcagctccaggtcgttccaccaaagtcgtcctccttcgtcaccacacaaactcctcaccatgactcgaactcaggtgagtacacgagacctcatcccgtacaacgtaaaaccaaccctcgatgaccccgcagcgcaacatctacccggccgctttggccaaagaccgcagtggtaagccgcaatcaccgtcgactcggggacgctagaccactgaccctcgaatcctacctttttctctccggtagtttcccgctcgggactcgacaagtccctccccaaaaagggagccggcgcgggtaactggggcagcatgacccaagagaccgaacgcttcctccacagccccgacaccatgggcgagatccagcgggacaccgacaccgtcgacgtcaatgtcaaaaagaccgccccgcaacccaaaccgaggaggatgagctcgatgagcgatgaagagaggaaagaagccgctactttcagaaagggcgccatgggtcgtcaggatcgttagtaccggtgtcaacgtgtcttgtcgccgtaagaccaggatcaagctgacaatcaccaccgcggtcacctcgttgggacttgcagtcgacctcaactccatcgctcgcacctcgggagccttctcccagtccccgccggagaccaacattctctcctcttcccccgtgaggaacatgaacgccgtgagtccccaagacacttgtcgtcaaggcgtgaccgcctctgacgaccgttgacaatgtgtacgtggacacggtagctcgcgcaaaagttgggcaaatattgatgtccccccagaaaacataccgcccaggcatcgttatatggagctcgccctggggtctggtatgactactgtatgaacgtgattcatgacgaacgaccggagacctgcaagagatataaaagttaggaactgagcgagatgacggcagactagtaaatcaaacgaaacaaagttgtaaatcatcaaagagaatctcatacgtcggtcgaaaagatgaagcgtagctgttgagcggcgcagtccccagactcgaaaactcgacaggcccataacactgtagcgccgcccgtggttcaagtttccacgtagacgtccgcctgttggactctacgcattgttgcttgatcatacccaaacgcaagctggacaatgaaatatcaaaattagcactttcaaagtggacgtattcgtttacaagatatgcgcagctgataaatagatgttcatgatgcaggagtacaacagcaaaagggagagattccctttgtatgacaacgaatatgtaggatctcttgaaccgatcgcaccccacgggaagcccttagctgcgatccttgttgctgagatcgagaactgaagggaaatctcagtcagacgcgatcacatcgcgctcatgacgtttcgcaactcacgtagattccattgtgccttgacgtgaggcgcgtcttccatcttgtctcccgtcatgatatagtccatgatatccacatgtcgaccggtggctggatcgacctgagccactgtataacggaaaacgctcagtagtggcacgcacacccgagatgaccccgtggtattgggcttacgattcgtattcgccgtctttgcccactgatcatcgaactgcagcaagtgtttaggcttgtctttgttccattcttgcgcatacaagagatgatccatgagatcgtacgcccagaagtgcttttccaggtgatcatcgcacttgctacctgtcatcggaacgcggtgccaggtgatcccttggggacactgttttccgtggtagctgtccatgtaggatgagacctctccccatcgaccctgattttccttcgagatccagagcacgaccttcggatgataccccggtgcgcaagtagcggtagaatggtagagcttcgtatttttgttgaccgggatgggtggctcgtacacgttcgctcgcaccaagattggatcctgcaaagtgagattgatacatacgttcttcgtcccatctgcactgttccttcggtacagggacctcttccgaaatccggaatgatcattcatcgtcagatccttgatgctgaacgtagcgccagtggtcgctgcggtaggaggggttgacgaggccccgggcatcgtgaccccacccacgcttgcagaagttcccgattgactgtaggtttcagcggtatgtaagctcatcgtgatagcgtattctgttaacaggcttggcgagtggtattcaattgctcaagcgaatgatgctgaacaccgtatttatcaccggcggacagatgacgaaggcgactttgctatcatctttatagctctgactgaaatggagagcgtcaggaggataaaggagggcaacgttctatgtcccgtgggagaagcaagccgttccctacgacacacggatcaaagggatctcggtttcgtggagctgaaatcttgttgcatttctaggacgataaaggaaacacacgctggctacgggaagccgggctgtccgccatggggctactttcacacggcaggggaaccgcatttcacgggcgtcattactacgagtactacgtcgtcccgagacgttaggacaaacgtacggctgctgaaccgattttacccttcctttgattgccaaaacgctattggatatcagcatgcgcatggtcttgcagatgattgaacaggccacaacttaaccctcgtccatactcaccaatgcatcggcacgcctcccataacacgtaaaagtgatgaggatccacctctttgacgacgtcaccttgagctggttacagaccatggcttcagagtaagggtgatgtaaatggagattgtgccacgatctagcacgtgccatttcagcatacataaattgtctactactcgacacgggcgtatatatacagagtcgaataggaaaatgagaagcaaaatagacgatgcgacttcgctgacatcaatcgttgttgagcgcgttgactggagtgcgagatgatagcgataatgcacatgctgtcagtgcgagaggcttttctgaagactcgctcccatacgtactgtactctttctgcttggccgtgagtgctgccaggtatctttgggcttctgctggcgcgtccggccttgaccaagctcgatcaggctcgaaatcaatcaatgcctgtaactctttcgtggcagtcttgtcgccaaggactgtggttcgtatgcgacggatgcttgagctgatcatgtcgaggctcggggagatgtagagctaaggcttaccagcgaaatgaccattgtcgtacgcagcatcaagatcactcgaggtgaacttgcggcccggaaccatcttgaccatatctaaattgtagggctgggttccaagcaactgcctgcccaaggcgtcttgggtttgatgagcgctgaaattatcacagaggttccaatgacaaagaaagcggagaggcttgtggcagacttgacatttctgaagacttccctccagatatttgtcaacgaagctacgaagctggggattctcgcagtatattggggtctcggggtgccacctagggttttttttaagatcaggcttgtattggaagggcttcttgattcgtcctgtaaagccactcttgagcaaaggaaggttgtaaggattgtgatcgcgaatgtggtcgcccttgagacccccttcgtagtggcgcacataaccgctttgcgaccagcgagccttcagatcgatgtcgagtttaggtaccgtttcgggatcgaaaacaacgagactctcggcggtgacagagtatccattattgctgtcaacgctcggaatatcgttgcgcgtggtcgtcgttggcgccctggagaggttagtcgcattggtcgtattcgtcggagcgtaagatgagtagggtacgttgccatcgttgtaggagtagtttcctgaggccggcgcaccagtagtatatgcggtgctcgccgggagcgtaaagtactgcggaggttgcaaggcgcccccttgagcttgggggctccatgggcgatcacctgccgccgactgttcggcctctctgcccgctacgctgctattggcaaagtcattgacggtggccgcgcttgcatagctggcaatactagcatcgtcagggttgatttcttcaggctgctgcatatgtgatttgctgaggatttgaatagtggagtcgaagttgaacctgtcgttaagacactatcttcccagaaatgttcgaccctgaccatctgatcaaacaagcccaatatttatagacccatggaaaggtcgttctgatacgaatgcagcctgtatcgggcaagatccgtatcatatgagcagcctgaacaaaggttgcaacaaagtaaaccttgcgtgatcctccgttccgggcatagtcgtgatcgattccctaacatcatcgatctaccggtgagggacaaggtcgttatcgccttttctgaacaaaagagccgcacgtcgacggcacacggccagctgtgatgcaacaagcacgagcttcaggggatcggcgcaatggcacgaagatacggcagatagtccctgatgttcccgtgatcaatcaaccatggcgagcgagaattaccggatgacgccgacccgaatcaaagggagtcgcccgaatcgatcacgagtcggcctatccaagaacctcacgagatgataaatgtatatggtgatcatcagggatcaaaggagaaaacacatgatatacggatgagagatgcttgtagtgtattgtcgatccctctctccggtacccgttgcgttgcgggtgagtcgaggacggcaatgggggtatagtcggccgggtctaatccgagtagactgtggtgagagcaatgaaaggtaggtcgcgggtcagtccatgtctaaagtaatgcgagatctacgcccggggacgcaccgaacttgagaatgaagtttgtcgtgatggcagctgaagagacggtcgatcaaggagaatgtatcagcgagcggttcgtcgtttgatgcgcattacgaccagatgaccggactcaccgagcagacacagacacaggacggtctatcgataaccgacggccagacgcaaaatcagcacgaatcctctagagcacatgtcatccctgcggcgacactcacaggtcccaatcggtcatcataaggtgcaccagttcgttgcctgatagccctcgctcgtgactggtagatcaccaaagcgtagatcatcactcccatagctgttccccccaaaccgacaatacatttactgatcagcctagcgtccgggcaaaggatctgcgaggaagactgaccgatgacggtgtacatggcagcagagatcttgccgaccttgtcaccaaagttcagcagaccgacggcgagacctccgagcacgacggcaaagtggagccacgagaggaaagtcctatagttgccgggtcgtcgccatgtcgcacgacgacatgggagaggtcgggttgtggtaggtgggggagaatgatcgtagcatgtagtagtggacaagataatggcgagggatggcgagcaaatagcacggtcgaagcatcagcgaccatgtctcctgcgtaattcgcaagccgagcttccttgcgagactgacctctcgttggcgaagaacctgatggaatggagttgatacgtcagtctacgcccgtaaatgtagcagatcctgcagaggccggaaagagcctggacttacaccttgggttccactcgcacgggcagagcaatccgctgttagacccaacgtaaaggtcgcatcatccgtcgtcagtttcgatgtaaacgagacgattgatcacgctgcactgagactgaccttttgagcagtcctttggagcaaaggttgggtggacatggtgaaaattaaagtctgaaagaggttgagggctggcgggaggcgatgcgtagactgatcagcgggggtgccgtgtgaaggacctgatgcgtcgagtcgagggagctcaccaagttgcctgaaggatctacaagagctgagcgtttgattattctaggcttttgaccggttcctgcccttgaggactgatcgtcgaaatatcgacaatatgtcaccaacttgctaggctgggtagctaggcatgaccctcctccctccccggtcagatgaggagattgtcccggaattttgcttccgccatcgttccaatcccgcgcacgttcttgaaatcgtcacagacctggcagtgatagtggtgttccgtgcgcccgtttcgtggtcgacgtagcgtcgcctcgttcgctcgttgttacctcatgacaccagcgaaggcagagttgcagataccctcgtctattcacgatctgctgacaggttgcgctggctaggaaggcgacgggaatcaccaatacgacgcggaatcatcatcgatcaggacctgcagccagtcccggcgcgccaggtacgacgagtccgtttgacatgtggacttgcgcttgcccgtgtgagagcatgcgagtagagtccgttggcgtttgacgtatgtcagagaattgaattaaagataattgagggagtggacatgtacgcggtcaagctcgtcgaccgggctttccgacctgtcgcgtttcgatggcacaggcggaccacgttcgtccaccttcctctttacgagtcccgggcacatctctatgacagcattcgacggatccctagttgagggttccaatcctatcctacccaaggtcaagagagactacacattcggtattgcgacatgttcagcttatcgaccgcctcgaaatcgatctagtccctgaaaagcgcatcgtccaacaacctgcgccgggacaggattttgggaagatcggagatcgattctgtcccacgtagatacaagatacttggtattttttcagagttcgaaaagccacgatggaagctcggaaccggaggagctaggacatcctcgcgtaaggatcatcgacaggtgttatactgcaactcctggacctgttctagtctcaccttgccagaaaccttagtgggcttgatcagaccgagtactctgggagcctcggtctgttacactcatgatcagcgcttagtacgatcagcgtgtagggatgatcgtatcgaccggaatgtcaaagtcgcagtcgaatcgaagagcaccagattcgcagtaccattgattatgtgtatgtatgtacagacggagactcgtcgtcttctttccgctcgatcccccgtctgtacgagtcagagcgagatagagaggttcgatcagcaaaccctctctcggcactgatagtcgcagagcgttcgttcaccagctcagcggggtgtgcatgagccgtggcgaggaccaaaggtagcgttcaaaagggacctcgaagattcttgcccggaggattgatttcctcgctcgttcgctcgctgtgttcttttctaatgtcgaaggtgcaggtgtaccacccttgcctcagatgtacagatgtatccgcccagacttgtgttttatatttcccgaaactgttccgtcccggtcggttggatgacgttatatcattacgagagagagaatcggggatcagagccgcgcggcggtggggcagtcgcgagttcgaacctcccacgtccctcggccctcgctcgattgtttcgcccgaaatgctctcggcgacgacgcatgatcacctcgctgaatggcatgactgcaaagtcaggaggaatatacgttgggtctgagtgacggccgttatagtatctcacgatcgatcggaagtgtgtgtgtgtgtgtgtgtatgtgtgtgtcgttgtgtctgctgccatcttatctccacgagtttatctctgttgccagctgtggccaatcccgcgagatcgggaattgactggagctacgggcaacggcaacggcaaccacgacgaagacggatgtggtcgtggtggtggtcgtggtcacatcgatcggaaacaactcatctattggtcttgtttgttcctgcctgtaccacgatctgccactgccgctccgctatcatccattcccgcaaatttgtggtctccatccatacctgtatatacctataccatcttgcgagtctgttttttgaaaaaaccaaccgacctccttcctccctcccctttccttagcttctcctccatcttttggcgccgaaaatcgtcatcggcggcgttttcgacttcggagacaggcaaccaccctcgaccctcgaccaaggcaacgaacgtatagacggaaacgacctcgtcgacgattgaagacatcgacatcatcgttcatcgtccacaaacaggacgctacaaaccgatcatcgtgtcaaacagcttcttttcgatcattgtccagaaccccccgtcgaacgatcggagtcataaccataatcgaccaggactttaggtgactgtctgcccctgcataactactccacatctcggacccggacccggatcgaccatcagcaccagtctttggccgtctcgacaggatcaaacttgaagacgacccgactcgacacgatggagtacgcagcttctcccaactcggtcaggccccaggctatcgggaccccgggcacatccaccccgtcctactcgggtagctcgacccccctctctggctcattctcctctgccgcaccgaccaccccggggggttccttttttgggctacacggtcacggtcacggtcatggccataatcaccaagcccatgcgcacggatacgggaatcatcataacccgctgccagtgctcgatatccagctggacaacgacgagattctcctccgtggagcgggatcggattataacccggccctgctgagcggaagggtggtgctcaacttgcaagagagtacgaacatcagggagatcagtatgcggttggaaggcaagggcaaggtcgtcttttatgaggctggagcgtgagtgtcgcgggacgggacgacgacgtgtggagcacgactgacctgagcccccccctctatcgacacatgatcgcccgctcgctcgctcgttggctcgctcgacgttgccagatcgtcggcaaagaaccaccattacaaccatccgatcatcacgcacgagtggagtttccttcccggtgagaaatcgcactaccacacgatgaaggccggtcaacacgtctttccgttcaatttcacctttccgggcaacttgccctcgagcatccggacctacttgaacgacgccaacattacctataaactcaaggcgaccgcgcacaggtcggcgtttcaacacaactttcacgcggccaagaacgtcaacgtcctccgtgggttcaccaacgaggcgttggagtacaaccagacgttggagattgaaaacacttggccgggcaaggtcatgtattgtctcaccctgccccacaaggcctacgcggcgggggacgagatccccgtctctgtgaaattcatgccgttggccaagggcacaagggtgacgcacatcacctcggtcatcaaggaatacaccctcgtccatacccggcattccagtcacccggaagtcagggtagcagcgacttgcaagcacgagctcaaggagggtagggcgttcagggtcacggagagggggtcagagcccgtcgcaccggcacatcatttccacggaggcgatcataacgggatgaacagtgccccgccgagcgctcctcctagtcctaggcatggacccacgctcggagggtccggcgcgcagaccccgatgagcgatttcgcgctcagcagggcggggagttttgccaatttgaccgggttgggatcggccatgagcagcgcacctcaggcatcgtccagcagtatcagtggaggcggtggtggtgctggtgctggtgggagcgggagttactttggtctcggtgggggcaggagcgggggagccggtgcgggatcgtcggtggccacgcccatggcaggacccagcgcgacgggtcaggtcgccgcgttccccgatgacatgagggaaaggggcgatgacgaggacattctgatcggggacgaagagatcgacacgatgatcaccatccccgtaccttcgtggaccacgccgtcgcacaacatccacccggtctttgtcacccacaagatcaagtggtcgtgcgcgatttccaacccggacggtcacgtctcggaactccgttgcgccctgcccatccatatcctccctcacgccctgctcgaagaatctcagacggcgacgagcagcacgcgcgccttgttgttcggagggtcgcaggaagagacgacgcatgtcgacctccccagttacaacgatcacgtgtacgataggatcgccaacgccaacaaccagacgccgacccacgggtacgtctcgaccggtaatcggacgccaggatcgggggctaggactcccgggtccggatcgaggacgccggcttccggtggggtcaccccggccggatcgagggcaccttcgagaccgggctcgcccgtgcttcgtccgatgggaggcttgcctacacccggaggaatggacattaccgacgagttccacccagcggatgacattccgccacgccccgagatcggatgggccgatagcgagctcatgatgtccctcggcgcgctcgcaccccatcagggatccaatcccaactctcgtggaggtagcccgcacgacacgccgcccgattcgaggggtccctccaggcctaccagtcgactcggattcaggagcggacggaacagtgccggaaacagtcgagctggaagtcgagcgtcttccccggaacgacccagctcggccaacacgatccaggccaacaattcgagtctcgccaacgggaccgccagcattcgtcgaccgctgcacgaacgacgaccttcgctcggcgtgcccggtggattgttcaacctcaccagcgtcaagccgttcaccgccatgatggggaaacatcatggatctcacagcgttcaacattcgcccaaactcaacgccacgccgtcaggcagcaacctgcctcgaagcggtttctccctcggttcccacgcggcattcacgaacctcgccgaggctcaggcgaacgcgcggggagagcgcctcccagggtccgggccaggttccggctcggcatccgaagcacacacgccatccgcccagatcgtcgatcctctttcccaagtgccttcgtacgaagtcgctcgggtcgggttcttgggaggtggagtcacccccttgagcgcggcaccacccgattatgccgactcggatcgtttcgaaagggcaaagagtgagacggatctcacccagctcgcccgagaccatgcggtacagggctcaagtctggcagccatgctcgaaaatctcgaagtcgaccctgcagagcgatcaacgctcaacgaggcaccactatagaacagattccggccacgtattgactctctcggcaaaagattttcccactcccactctctagtcgaatcggttcgcattttcgggtgcaagatgaaatgataggatgctttatgcatgatcccgttgggtatgccattacggaaagattttacgacctgggtacaagatgcaagatgacagataatgtttcgatatatgcgtttcgtggggtgtcgtcaattagcggcttgtggagcgcggcgaggctcattcagtcttgatgatggctacagctcgcttgcggaacgagcactggtgacagatcttgggacctgcgggagccgaggacttgtgactcatgctcgtaccagtcgtttgtgccgtcgtgggtgtcgctgcggccgtctctttattgcaggggtaccatttcggcgaggcgtcggttccgcattcgatacagcatgggtcatcggaagtgtctctcttcgcctcgccgtaaaagccgcatttagcaacctggtcttccagtcttttggcctttctcaatagaccaaacgattgttcgcgcggtacctgtccagccgattgagcgtacgcttgcaatgccgactgtagagcgcaacggatccatgagctgaaccgaacttgtcaacatcgacaagaaaactcacgaggcctgagactggatccatatccgtgaggtcaaagtgccgcttgtctttggagatcgagtggtctgtgcacagacattgcggcgtcatgattccggtgacacctttaaatgtcatggctgaagcttcagacttttcacgacgagctcccttgctgccggtctatcgtgaggagccacgaatctcaacggttagcgatgttcgctatttcgaaggtgttatcgcgctcaccatcgattgcatttcaaatgcaaagcggtaaccggacatccaggcgcatgccggatggaatcgcctaggacagtctccgcagcggatagtgacacctgccttcgattgaccgcaaatatcgcactgtagagtcaatcagacgtaggtcagatccattgcgcttcacgtcgtttcatcgaaagcagggccgactcacgtcgccaaattggtttgcctttagcgacatgattccttcggtcaactgaagatgactgccgtcggaccactgtagatccggcgtaaaggtcgcgcacaggacgtgcgtccacttgtagccctctgtcggcttgacggcctgcaaaaagtcgaattcgggcatgacgcgggggcgataggcgagcggtcggcgcagattggggaggctcttgggacaaagcacgcaagagatgtcctagtatgggtaaattggtcaggtcgagctataaatatctcaatgtcgcgctccctagcacttacgagggaagcttcgagggttttctcgttggcacaagggtcacacagccacatgtctgtgatctcatccttgggtaccccatagcagcctgtacgtcgattgcaacaagcgtaagtcactaccgtttgcgctttcacctgacgatgactgacctggatgcacagcaaaggtacaattccgacatcgagccataggctttggttccattttgtagcagtaagcgcaaggtgccagcttggcgggtgccggtaatggaggaggcggcgtgcctgccctggatgcgttggcagcagcgacgatctaacacaggtcatgcctagtttagcgacggttggacaatagaataattaccagaattctgaccttctgtcgcttgctggttggctcgtccatcggcgtgctcgaacgtttgtcgccggtcatgcgctccagatgggcgcggtacggtaatgatacaccatacttgcggtaagaggagctgtagcgaagcgtcaggaatcagtcacttccacccgaagcaacggtatgcaggttcttgcttacccgcagtggttgcacagatacgatccttgctgtgaccgcgccgctttccaccacttggtatccttcttgatgccgcaggccgcacaggctggtttggaattgaccaactcctcgtcctcccaaaccgacccttcagcgtcggattctggcgtggcttcccgttggtggccaagcactgaagcagcaccgctctgtacgcctgtcacggccttgtggttcttcggtaggtaccgcggacctttggtcttgcccttggctttggcttcctttttcgccttgaccgggacatctggaggttcgtgcagactgtagctgagctgcaatcgttgcctttggcgttccgtctttgcgtgcgcgatttcatcccggatcgcagagttttcagcagccagcttctcatttctccatttgtagtagtatcggacgatctcccatggttcccgtccgaccttcttggccgtctcgtgcgcttcaagcgaaccccatcgcatcaactcggtttcgaagatctcgagctcccgtgcgtccagctgagacagcgggataatacatcagtccaattcaaggctcgcatcctgtgctttcctacttacgtctcgcacatatcgttcaccaccaaaatcctttgcggtcgccttgtctagttccttgttcaggtctttcacgtctaatcgcatgttccaatgcagcgtataatcataggcgtctaccgagtaaccaggaactgcgagccgcttcattcgcatcatggagatagccacctcggctggaagggcaggacgacgcttgagcccttctagtagcagcttgcctaaacaactcgatactcacgttcaaagtccggcgcgctgttcatctcgacggtgtctgtacccctctcgggcactgcaagaaaccatgcaacgatgggttcgatgaattggtgcatatgagaaactttataaggaccagactcacactcttcttcggaaggcggatgtaaggctcgttcgcgttcaatttcttgctgttcctcccaggtgggcacgttagcttggaagcgctgtccaagacgagtgacttgacgagggaaaatgggatcgtccgaatctgtaaagaaaggggtcagttgcttgcaatgattggtttgattggcaccgcttgtttactcaccgaccgagtgctcggcaaccgtgtattggctgcagagggcagtcttgatcagcataccaaggtaacttgcaaccaaagcgccgaatactcacccaaagtagcggaaattccaacctctgaaaaaggcatccggcttgtcatagtcgataggtacagacttttccttagccttgcctcgtccagggcggccaagtgcgacctgagttacgggaatcgaggcaacatgatcgctcggtttgcttccgttacggggaactcgatcgtgcatgcattgtgagcacatccagctgtaaccccgagttggttttgccggtagaggcgggctaacacagtccatgtgataccatgccttgcaaatcctattgttattgacacggtgccggattttcgtcgattagatcgcgtgtctaaacaggtcgcgtgatagtcgtcaatacgtactcgcacttgacgctctcctggctagctgcccattcgaggcatgttcgacatgtcctaaaagcatcggtgaggtccgccaccatttccttttccacgacaagaaattcatatcgcttggcaaggactcgtcgaacgtaatcgggaactgcggaaggaaaaaatcgatgagtgttcggttccggcaaaaaaagcgcgatatgcatatgtgcgatgtcgatcggttcgaagttcgaatctcaaggttgacggtgatcattttgtcacgtcgaggctggttggtcgatcgaacgcgcgcctgaacgccgggaaagggccgaaagagcgaaaggtcggggtgcttgcgaaaccgggtttcgtcactcactattggtcacggtcgtagtcctgatcatttcgaactctcgcttgatgtacgggtcgaacagccgggagtagtggaagtgatcgggcttcttcttccattcttgcaggttctcgatcttttccctatgtcgaacccagcacttgcctcggagccacgagaccggatggacttccgagtgaatcgcagcgagcaacagccgatgatcgctcgcaagcctacccgagatctaagaggcggcgcaaaacgaacgatacggcacttgctagtcagacggcttgccaacaccctgcaagtggttcgacgttgctaacctcgctcggtcgatagaaaagtgcgattctgacgtgtcgctctttgctcggacccttgttcacgttgtggttgtacttggccgcagtcggtggcaggaactcgatgatcctcgcaatcgagtacggggaacctaccagaacgtactctcagaccgcatccaagacatatcaaggttccgaaagtcggcttaccgtcacgctcggaccagggaggtgcgaaataaacatagtctatgcagacccggtcgtgaagtgctcgcgattagatttgccagaaccggcttgcacttttctcgctcaccgttgatggtgacctcgtcaccgttacccagagtggccgtggcgggtcgctcgagtactctacccatggtcgaggctaccacagccatggtgagtggtagaaaggaggatttgaaggcgggagagagggtagatgagtagatttgaaagagcaaatgtcgttgtgattgcctgggatcgctcgactctgcaaagagtggagggcgtcgatcagccttcgcgcgcgcgggaggggagcggccgagaacgaaaagggaacgcaagatgtgtgcggtcatccagcttgtaactcagtcggaaggcgcagatccgattcgatgggatcgagagaagaaagagggaatattgaaaggagatagagtgctctcgtgtgtatgaggttgtcgagagtcaaggataggagccgttgaagtgatcgcctcaatcggttcgccattagctacaactacgcgttgcaacatctcgcttgtctcaggtgcacatgacgtgtatgcagatgaggctgggcttaagatggccgagcaatttttgatctcccgaagactgagctcaagagtcttacctctcactagcaggtgccaggatgtctcagaggtcgctgacagtgaactgaagtgccggcacgtcgattcgaaaggaaggccgtttgagctgttctgcagtccagtctcgctcgctcgatctcgcaatctcgtaccaggcaaacaccgagactcagccagacttacagtcgagggtattcaagttgatcaagaacagtttcaagccggtgatgttgatcggtatctcgtcgtgtcgattgaaaagtgcgacgaatcgagcgtgaacaagtgggtgatgcgatgaacggtttgatgagaaaggtggaactcgagggttcagctcggtcatttgcatccgaaggggttcggcgctgcgtggtgggtcaagtgcagcgggcgaggaggcgcacgaaggaggagcggcagcaaagacagattccgccacacatcgccacgcgaaagatcgaagagtctaggctctacagcgaatccacagccactttgtatgcctaatctcgacgtacacctcggcacctcgaccgctcaccatcatttgcgagtaagaacgggcaaatttcccaatggaaacggagttgaatggatgtgaaaggttgtaggcgttgtcatgccccttgggctagacggagccggccgcaaagtaggccagcatctcatgactaagcccgaaacacgtccttgagatgtgttattttcagtgattccgtgttcatctggcctcaacagcggtacccagtgaccattgaacccgtccattgtctagtatagcgtgttcatctctaaagctgtccaatatgagtgtattacttgagattctgccgttgggaacgcgatcggacaaacgaaatggcaacaaactcactttaattcaccctaattcacaattgggatgtttttcctagacacaaaagtaaaacgttgcatagatcttgcatctactagttatggtgatcgtatgaattaggatcattctttatggccggcgttccgacgacttctcagttctgcgggctgcctgagcaagtataagtttacgaattcaggagaaaaggcttgtcgcgcaggtcatatccctgacaatgcgtggcaacgttgcctttgccgttttggctatcaatctcatatccgttggggcggtaatcgacgacaaaaagaggcagggtgcctctggtgatctaagcttataaatcggtattgatactgccgcggcgacgctggggtaacacacctatagttcacatctcatccacaacatcaggacgtctgaaggaaggaaagggttgagaaaggaacagtatgcttagtccggcatagggaagcactataacaagacagattccgctgatagtcctggtagcaagtcgttggatgcctcgcacgcgcgatttcacgactttctggcattgtcagtcgcattttgtactgtaaaaccagtcggtgcaaggtcatggcttacaaatacgtgggtggtgctgacgtatcgtttcgatgtgcgtataccgggccatcttgctcgtactctcatgatgaactaacgtccggctgcacatgagcatgacaaagccttcgaggaggtgcaagccagtaccagaatgtgacgagtccgatgcacctaggaagacttttaatggaatttgagtcgacaaattcagagaagtttggggcatgagctattgcgaagcgctcctgttgcggatgtgcggtaacctttggcttgtgctctttcaggtcatcgaaatcccagaaagcctcgatgaagactgtcaaaaccttgtcttgtccacgtatcggcgcaatttgatgagtatgtggaaaatcaaacagagatgataagatcgccgaggggcccgacaaccgtgaccttccctcacaaaatcgagactgatatgtagcttcagtatacccttgccggtgatgcctgacggttcaaagccagcgataagcaatgcccggagaatcttgtacccgcaaatctcaacacgacactgataagtgcgaatccgtacggacagagcgaattttactgaaacaacaacacggacgagctggggttgaggtcatgtcctgagtggggtgatgtggggcgcttagcgtagacattagctgttctgtcgccgaagcagggtaagatccacggcagattggtacggtcgtcatgcaagttggtcaggctccgcgccaatcgcgctttagcatagctggtctcgcatattgcgggttgaacgatcttgagatcgtgtccggctgcgattccgcaaaagacttcgtttgaaacgatattcatatcagaaaagaatcgatatgcatatgcggttcgcccatccacgacatcgtctctcccctacagccccgccttgatcccgagttgcgagggtccagcaaggccgtagagaaagaggccgagagagtcgtaaaacaaatgggaaaaaagggattccagcacttgggtttccacttgcccgcttcttccccttccggcaaaacgtccaggtcgaccctgtcgagtcgtccattccgtcccggtctgacgatccgcaggttctttgaggaatcccgacgaaaaaagtccttctctggtccaggttctgcttccccagagcctgaacacctcctcgtccttctcctgttccatctgacatcgtccaccgtcccatcctatccagtcaaatccatctagtccgaaaaattcctctccattccctctgccttcagatcccggtccgagtttccgaaagcgagttgtagatagggttgtcgttcatgagaggatttaagaggaagcacgggcagcggcgagagccttctgggtaccgagagcagcgtaacgggcgttacgacggaactgtggggtccgaaggagggtgttgggttgtcgtatggttgcgaaaagatatcgacggttcgttgacatggtgaacggttgttcagttacgccaatgtgtgtcaggagagtccattcccgagcggtgttccagtatccgttcatgtcaacaaaggttcaccgaaatattcatcaatcgtcatcaggtaggtcatcaaaggtaattccgttagcctcccatttcgagcggttgatctcttctgcggcctgcactgaccttggggtcaactcccttcatcgaagtgtacctgtgggtcttgggcttggtgataccgtttcggtgggctgtttcacgtcaaaaccaagagagatcgtccgttcatcccgtcagtcccccattcatcctatatcgtctgtcacgccgtgtatcttgctctacacggcgtttccttcgagctctctaccgactaacccttggaggcctggttgtggctatcatacagggcataatatcaggattagtctcacccgacccatagaacgttcgaccgtcacatcctcgactcacgcagtgtggttcttcgacttggccattttgacaaggtgactctccggctctttttcttgacgaggggttgggtgaagaagggtaaggaccgggggcgggatatgtttaggacctcttgacaacgaccccaagaggtcgacttggccaggtttgcgcgagctcgagaggggaaaggggtgagaaaggagggaagagactggcaggaaggggggcagggtaagcgcgactgtcggggattggcgcttttttgtggcggcacaaggtcgagggacgcgagatctagactttcctcccaagtcctggactaagctgtagacgcgagctatcgtgacggctcgattagaagcgcgaagattagatctgccgtaatatcctccgcttagacactggccttcggaaccgaacagacgtcagcgatgccgtacagttcatcatcgcgtggcgtcatctgcctccctcggttcggtcgagcgaggtttaggtcgatctgagcccatcatcatcataatccccgtcatttcgacaagaccttgacctcttcctggacagacagacagccaatcacttacatctcgatcttgtcattcgatctctccgctttagctagcgacactctcctgctatgaacaggacgtcagcactagtcggccggatgcctcggctgcatcgggccgcttggggtaccacggggttcgccgcaaagtcgtcacgggcaacatatcctttgggcaccgcgaatcgactgtcaacacggcgggcctacagcgtgaataccgaaggtccgaagaagcagtcccttggaggtgagtagtagcttgatctgaacacgctggtgttttctcgagactgatggtccattgcagcccgcctcagccacgcatggaactcgacgccgacgcgatggtaccctatccctatcgctctgggcgccgctgtactcgtcgctatccagtacaagaggagtccgtttgcctttggagccaaggaggatcaggctgtcgtcgagagtgagggcgagggtggagctagggtcaagatgaagagcagcggtccatggcaggtcagtcgggacaatcagtccgtcatcttcgacggaggtactgatcgctcgcgatgtatctcacgcatctaggtcacggtactcggcgctctgcctctccgatcactctcccagctctggggatacctgaacggactcgttctccccgtctggttccgcccattcggtttcaagctctactctgccatcttcggttgcgatctctcggagatcgaacccgccgacctgaaatcgtacgaatccctgggagagttcttttaccgaaggttacaggacggggctcgaccgatcgacacggaagcggcgctggtcagcccggcggatgggaccgtcttgcatttcggagagatcgccgaaggtggacgggtcgagcaggtcaaggggatcacgtactctttgggagccttgttgggcaccggtggacagagcgtcgaggccgtggaagagatcgcttcgaacagggactcgaagactgtggacggtgagcagcaagcgcgcgttgtgattctagctcagcgataagctgacgaaaagccttggtctgctcactgcgcagatgaacactttgccaagatcaacgacatcgagtactcgctctcgagcctgctgggttcttctcaatctcacacccaggtcaaggagcctaaccctaactcggggagcaacacctcgcccgaacctgcagctacgaatcaacctcacgatgctactccagatgagatgaagaacgaccccagcaagctcactcacgatgctaaggtggccatggaacttggaccctcggccagccttcacgcacagactctggagcacgaaaagggaaacagcggattgagtgtcttgggcgagacatctcccatgcaccaacacaccgggtccaacatgccgctcagggagggccacaagatgttcttcatggtcgtctacctcgctccgggcgattaccatcgcttccattcgcccacgagctgggtggtcgaaaagaggcgacactttacgggagacttgttcagcgtcagcccatacattgccaaaaggatgcaggatctgtttgttctgaatgagagggttacgcgtgggtattgtcaaggggtctggtctgggaaacagatgcgggaaagctgacgagcgcttggcgttcttgttggacatcagttctcggacgatggaggtacggattctttggaatggtacccgtcggagctacgaacgtcggcagcatctgcatcaattttgataaggtgagttcgtcccaccgcaagcgtgcagagacgtcactgactcgtcgtcgtcgcatcactctcactcccagaaccttcgaacgaatgaacgataccctcaacaccctcctcatactttcaccgaggccgtctacacgcaatcgtcgtctttcctccggggtcaacctttgaccgcaggggaggagatgggagggttcaagctcggaagcacgatcgtgctcgtctttgaagcacctgaagggtttaggtttgtggccgaggctggcaagaaggtcagggtcgggcaaaagttgggagtgatcgacgagtaggccggcggccagtagcgggacgagggtgtttgcgtgtcttttgttgtatcgagaataattcatcgtcacgatcccggatatttcgagaagggcgggggtatcggtaaagcaagggttttgtttccggatcaggccttgcgtttcgcgcgtggcccggcccacgttgcaaccgacgcatcgttttcttttcgtttcgcgcatgatcagcgacttaggcaggggaaggtcaagcgagccgcagttctgatcagcgccagctaatgatgctgtgctagtctgagcgtgctgtcgcaagtttgttgttcgacctcggcggcagcactctcgtcagaggtgggttgcaaagaatggggtgagattcgcgtttcactgatcaaattgatcgaatcacggggcctttgcgaggggaacggtcagggggaaacccgacgcgatgtctgcctaagcgatcaatacaatttccccgtctttcatcgttcagaactcaggtttccacacaattgatcattgatcacagaaaggatccccccctcgttcgattcgcctgacagctagccgagctgaatcatcatcacacaatcactctacaatcactctaccttgcttcgttactgacatatgctgcggttatcgtcgaccatgaatgcctctttactacaacaggtcaagagatcaggctctacatcgcactttctccccccatctcagcaatttccttactgaagatcctccctcgctgatccagcccgcgccctttcctgctgcccgagctcgatcacgaggatacccctgcacgtacggtctcctctctcccgggtgagcttgataccggctacgaatcgacacacgtttgcctattcgcccccttttcctggaccacatagcagagtcaacgaatagttatagaagtggcaggactctgaaaccgactccatattcaccgacttgacggcacctcacaacgcacaccgacagagcataatatcattactggccacgatcagctcacacttcgacagaccgccggaccaagcatcatggattttgaggtaagcacagactaccgacccgtgtaatccgaagggctgtccttaatcgccttcgtctacgtactccttgattaggtcatcccggtaagtatgatctacgaaaacctcgccgttcactcgaactcatcctatcaacgacatgcctggatctttcagtttgaagatatcgtttgggggccagtcctcggagcgggaagtttcgggcaagtctataaaggtaggtttccctcgagatcctctcctgagttggaataatattagctgcggctgatctgctggtactgtggaactcgatggggacaggaatgtacttggggttggatatcgccatcaaagagatcttgccgaagaaggactatgatgcgtaagtgccgcaacttatcgcaagaacttcataccgagatcagtaatgctgatgacacgtagtttcattcagaaacaagtacttcatgagggaacacttgctcatgcgggaatgtagacacccgaatatcgtcctcttcctgggccttgcccatgaaccagtcacagccgggagaacttttgtaagtcatggtcacaaacccgacagtagcttggtcgttctcgtacgtgcacaagctgatctaaacttcggtcgtgatcgggtagatctgttcggaattcatcccgtccggaaacctgaggtcgttcatccaggagagcagtcgtccgttcccatggaggttgagaatcagctttgccaccgatatcgcccgtgccgtcgcctaccttcacgctagaaaggtgagcaccgtctactcatgtcatcgtagtggagggagaccgactgttcgccttgtcacagtgcattcatcgagacctgaagggcgagaacctcttgatcacttctaatgaccgggtcaaggtgacggatttcggattcgcgagggtcagtcttagtggtgcgcttttctattcgacggcggtcctgatcgaatcggatgctggacagatcgctgctaggaatgatgacgagatgaagaggatgtcttactgcggtactgatgtgagcatgatatcaatccaggatgaccgactgaaggttgacgctcggtttctggtcgtcggtaaagggatacatgagcccggagatcctgatgggcctggactttgatgagaggaccgatgtcttttctcttggaattatcgtcagtcgaggcttgtcgtaaatgatcaacgggcactgatgtccctacgaacagtttgcggagattgcttcgagacgcctggtggatgcgaagaaggaaatttttaccgtgagtagttcagtacacggatcgttgtacccaacgtcgctgactttgaggccttcccagcgtttcccccctttattttccctcgatcgcgcagagatcgaaagacttgcctcgtacggttgtccttccgaattgatcgacctgatcatgcattgcgtcgaagtcaggccggaagaccgtccggctatgcctcaggtgctcgagaggttacgaaccatggaaatcgagatcctcagcaggctgacattcggcaagggagaacatgttgggagtatcaagatcgttaagaggaaaacaaggggaggccagactgtcggaactcgaggtcttgcgagcttctttgacaagcgcgaagccagtgtcgcggaagaggcggagcagtacgaggatgcgaaggaacaccagaacgaatttgaatacgatactgaggaggaagatgtggccaagatgatggaaggctctcttaagatcgaacacgttggaagagaggtgacgacctggcgcactgcgagatgggatgagccgcatgccgggaagcagacagtaatggacctcttcaacaacccgccaagtcagtccatgtcgtatcgactcacgcggagcctatcagctcactccactgtgtgtttccttctgtagccaagatacccggtagttaccccagcagccttcacccggatgcgaaggcgacgagctcttcggtgatcactctgaaagcgaacgatcatcgcgggccgccctctgctgtacttgtaggaccgacaactcaagaaccggctcagacccaatctgaactaccatccaagctcgaggaagaaaactggcaggtaacacacaggcaagaaaaatcgagtactcacatgagtgtcgatgagccggaatcacctcctctgacgcgactccttcctgcaacccatcggtaagttggacgggatattttagcccagcggacattgatcacttttttctaccgaacgagcccagattctcgatggttggcatgacttatagcaaacctggatttatgaaacaacctgggcgtgagtgtcaaggttgcggggttgcggcacatttagagatcgcgaggtcttacatccttccgggcatagtcgtctcgagcgcgtttgccatttttgggcacggatctagcacctatccgaggaacgaatccaaatgtcatgcttgtggcatcaagatcggtaagattatggttcctctggattataaacaaggcgacgaagctcagccttatgatcgacttcaggccggcgacccgcaatggagtgcgacgattgccacggtaggtcgcatagggccgcattatcccgatactgttctgactatgccgcctcatgtcttcagcctttgtacatgtcaagtgggtaccgcccgatttatcaaagtccggaatgaacgctgattcgggtagtactctaggtgttccgaccgagccccggtcgactgtggtaatcactagcttcgtggagtcgccttttgataacattcgcacgtcatctttgatcatttgtccctcgattttctgccgtacatcacacggacacctctgtcatatatgcattagcttgatcgtacatgttctacaatcataatatcaatcggtacatgcggtctttacgcaacgatcatcgacgagaagccctcaggttctgtctgagaccggtagattgacctagagactggttgttgattcgcttctcgagttcggcaaccttgccggtgagaccttcggtgttttcgttgatccagccgagcgacgagacgtgggcgctcaagatctgggtgaccgaggctaacgaattggttccctccaaggaaagctggtcggtggaggatttcccggtcaacgtgttcatttcgccaatcatggtggacaagttggtagagaggtcgtagagttgatcgttcaagcgggaagccaaacgagtcctgagagcgagcaggagcgtcagaatggagcttgaccgcactcgtaccaccaacacgactcacatttccgcacgctgctgatcggctggtcgggccgggggttgagtcatgccttgcatcgtgtcgtttgcgactcgctcgtactcgtcgacctgacccaacagaacggcttgtcgcgcctcgacggcgtccaatgtagcacggatattggctcgttcagtctcggcttgttgcatgtccgagtacaatccggcaatctgagcgatacctcgtcgtctttagcagcgggatcggcgcgtacttttcgcgttcgaggggaaaactcacgctagaagcgttctgcatcagaaccatatcccattccctgacttctgcagcttgatccttgaacgtcttgacttgagtacccagctcctgctcgaatcgctcgacaatctcgttgaacgtcttgcccttgacgaaggaaggtgcttgttcgccgagggcgacggtcttaatagtctggttgttgttgttgttgctgttgttgttgttagggttgaggttggaagatccggcagagggtttagcaggagcggcagggggaacgccaccaaagagggagccagcgggagcagcaggcttgctcgcagcgggcgtagtaccggcagccgcaccgaaaccaccgaacagggaaggcgcagcggctgcgggcttgtctccggtatccttcttctcggcactattgcgagacgatcgggtcagttcaagcaggaatttcctggtgcggacgattcgacttacgcaggcgcggcaggggcggccggctgatccttctgggcggaagcgccgaaaccggcaaagaggttggccgaagcgcctgaggcagcaggcttttccgcggcaggaggttgactgaatagcaggaacaagttcagctagaccatccactatccgcttgacaacgtgtttcacagtcaaactcacgcagtggccggggcatctttcttggcaccaaacgaaaatagactagaggcaggaggcgccggggcgctggcaggagcaggagcagcgaccttgtccttgtcccccgcggcaggttcagcgggtttgttgaacgagaagagaccgccggcaggagcggcgggtgcagcagtaggtgtaggggtagaagtcgcggcggggggttgacccgagtttccaaacagaccaccggcagcagggggtttcgaagcgggactggggatgagaagccaaagtccgctcgttagtaccgtagtactcgatggtatatgatttgatcgacaagagactcacgtggtcgaaccagagttggcagccgagtttccaaaactgaacattccggtagcggcaggagcagcagcgggagccggggtcgagctgatggttccacatgtacgaacgtgatcagcatgtccgtcgtcgaggatacgtcgcggcgagcacggtcgacctaagatttacctttttggggcctcggcgggtttcccgaaaccgaaagtcgaagtcgaagctgctactggagcgggagcggcagcctgagagttctctttcggtgcttgctgtggcgcctgaccaccaaaccctcccgttgctccgccgaagcctccgaacagtccaccgccggcagcgggcgcaccagctttcgatccttgagggttcccatcgtcctcggcacctcgtttcccactcgctcctccgaaaagtcctccagtcggcgcaggagttgggtcggccgaagctggagccggggtaggggcagcggcaggagtcgagccaaagagaccggtcttgggagcaccaccgaacaagctcgtgttctgttgagcgggcgcgtcgggtttgggaggttgggcgccaaagagacccgtcgaaggagcactggatggagtgttctctgcaggtttaggggcaccgaacagtccaccacctgccgcgccggatccgaagagtccaccggtaggagcagtcgcaccggctcctccaaagaggttcgaagtcggggccgaggtcgctgccgctggaggttgagtggtcggggtcgagctcccgaacccaaacgaagggggctttgaagcacccccggcagtcccgctcgatgcctgagctccaaacccagagaacccgccggtaccccccgtagccggttgagcggcacctccaaagagactggaaggagctgcgggtgggttggaactgggagtcgtgcttcccgtcgacgcgccaaagctgaacgtgggtttaggttgttgaggcgtcgaagtggacggtgcggcggtgttcgaggcagggtttccgaacgaaaaggaggctgaaggggcatccggtgaacatgagcgaattgtcagtcgacgtgtgatgatcagcagggcagaactagggtatcacttacgggtggcagtacctgaaaggatcacgaacgatatcgaaaacatcacgctcagtcccgctgtacggtaccggcccggtcgacatgtatacagtacgtaccgctcgcaggagccgatccgccgaacaggttgccagcaggagcttgtccagtgcccgaattgttggctagaagagagtcagaacaggagagtagaagacttcatcagtgacatccccgagctcgtgtcgaggtggaatggacaactcaccagtgtttccaccaaagttgaaagctgtcatgaatgtggaaggaacccgtctgtcagcccgtgtcttcgcgtcaaccgccgttgcttgccggtcaagtttgactcacacatgatgctgcttcgatagtttctatcttctgaagcactcactggacgagagtgtgtgtgtgcgtcacttgcattgatgcatgatgattgatgatgttgtatcttgaatcgtggtcgacttggaactcgctcgcgccatgttgcccgctcatttcacgtgattcactcgacgaagggactgggacattgcatcgacattgtacaatataccttaccataccatatgatcgtggctaaagatgcagcaagatgatgaggagagcggggttaccctggccgtaggacgctcgatcgagagtaaccagagctctattgatcgacaacagccacagccacgccctggtctgacgcctcgtcgatcacgagtactgtcgaagaacgaagttcattgcaacacgggacagactcggaaatgcagatatatggctatagctcatgcgcgaacaagcgagagggacgggataaaagggtgacgagcggaccaggcgaaaagaaaaaacacgggaggaggaaggggtttcgttttttccaaagcccccttctcttttggtagtgcgaggtttcgtagcgtctagacaaacgggacgagcgagccgtttagagctcctccttgtagtcgggtcggagccttcggactgcggggaggcggggtaaagagaggatcgaagcgtgagcatcgaatggggcggtgacaggagtgctaggcgaccttgtgactcaccagtctttccggccctccagatctcctgagcgtcaatctcggcagtctcctcggcaaacttctcacggtagtccttctgaccgttgaactggagcgatcgtcgggtctcgtttccgttcttgacgttctcgtagagcgacttgaagacgggcaagttggcctcgtaaaacttgggggcccagtcgagagctcctcgtcgggcggtggtggaacaggcgttgtacatgtagtccataccgtacttgccgatcaaggggaagagcctgaggcgtggtcgtggtcgagcacgtgtaagcaagatgcattcaaacgcaaggcgggtggacgagtcggtactcacgactgagtggcctcctcgacggtcctacacgggtgaggtcgcgatcagcgttcgaactcccaatccaaagtgcagaactcccctcgactcactcgttgaaagcctcggacggcgagtgtccgttctccctgaggacctggtactgggccaagaacattccctctaccgagcgcgagccacgacgctgatcagtttcacgacgttcccaaattcggcgcgggtccgactcacggattcctcccatcaagactccacgctcaccgtaaaggtcagagtagaccctgcgtgaagacgaggacgtcagcgaaaaggctcgttggcaaactcccgggggttgcaggacgccgactcactccttttcaaaggtggtctcgtaacagtatccggaaccgacggcgattccgagggcgacggccttttccttggccttgccggtaacgtcctggaagacggcgatggacgagttgatacctcgaccctcgaggaagagggatcggacggttcggccggatcccttgggggcgacgaggatgacgtcgacgtccttggggggaacgacgccggtctacagagcgggagcgcagggtgtacacggatcatcagcttttccatgtacgagcggaggtctgtcgacgccgaagcgaacgctaacgctcgactcacgtcctccttgaagacgacggagaaaccgtgggcaaagtacaacgtcttgtccttggtgatcaacggcttgatctcgttccaagtctgggactgggcggcatcgctcaacaagttcatgatgatggttcccttgccgatggcctcttcgatcgagaacaaggtctcgccctcgacccaaccgtcttcctgggcctgcttccacgattcacctcccttgcggacaccgacaatgaccttgagaccgttgtcacgggcgttgagggattgaccgtggccctgagatccgtacccgatcatggcgagggtgtcattcttgaagtacctgcgaggcaggtcaagcatggtgacaaacgaggagagtcgagggaggtccggatcagccttctacgtcctcgtgcccggcgagactctgcacaccgcgtcgaatcgagtcgcgtcgcgtcgtcgtcctcgtcgtgaccatcgtgaccatcgtcactcactcggtaagcttctccgtgggccaatcggcacgctcgtaaacggtctccttggtcccggcaaagtcgagcgacttgatgcctcgggcctgtgagagcggcggtgtacggcgtgtagcgcgaggagatttttttcgggattggagaggaggacgaggtggggaagagttagaaaaggggggggttaggacggggggggggggacacgttggaagagcgcgagcagagaggggaggagaggagaggagggagagagcatcatcagcgtgcgccgttcgattcccaaccagctagcagcttgcagcttgcagcttgcagctaacccagcaacccagacgtcgtcgccgtgcagactcgtctgatcctcaatagttggtatagtagtaactagcgacagcaccgcaggtcattgttctcctattcaaatatacacatacataaaaacgtaagtagtcttcccctaccccagtccttccgatcggccggatcgtcgatcgtccccagcggaatggaatggaatgttcgggaccgtagagctgacgtccgacattccgtaccattcttcagactttacgacctcgtttcccggcttattcatacatacacatcccggatcgacaggaaagagttttgaacgagacgatcccagcatagacggccactttcctgacaacgatagcgcatcatcctcgaaccaatgtctcaaccatcccaggactcggcttcggccagcactaacggtgcggccaccaagccctcggccaacgagattgggttccaattcgtcaaccaatactagtgagtcccatgagatcctacttgtcgatcgctcgtctggtgtacgatcggccactgacgtcgacgtgtgcggatcgtagcacctttttgaacggctcgcccgagaagctgcacaggttttacaccaagcagtcgacgttctgccatggaaccgagggagaagagagtcagcctcactttggtcaaaaggtgagtcccagcgtgtccgctaacgacggtcatggacctctgaactgaccacgtccccccggaatcggtccacccgcacgcaggatatccacagcaagatcatgtccctcggtttccacgaccccaaagcgttcgtccaccacatctcggcccaatcgtctcaatccggtgggatcatgatccaggtcattggcgagatgcaaaacggggacgacgcgccctggaaaaagtttacccagacctttttcctggcggaacagcccaacgggtatttcgtcttgaacgacatcttcatgtacctgaaggaggagaacgagtttgatgaggatcagcgggtcgaggatgatgagcacggtgtcgaggttgacaagcccgtcgaggaggttgtgaccaaggaggaggaagaggcggcggctcctgctgccgtcgaggaaaaggaagccgccgacgaggtgcctgctgtcgccgaagaggagaagaaggaggatgtcgtccctgctcagcctgaggaggtcaagcaggaagaacccgccactgctatcaaggaggaggaaaagcccgtcgaggccacccccgctgccgtcgcagaggaaaaggcagagaccgcaccggaacctcctgttagcgaacctgccgagactcccaagcccgagcaacccgtcgaaaaggtggagaagaagaaggagcctgagcagcagactcagcagcagcaacagccccaggttaaacctgcgccccccgctgccgcgcctgctcctcccaagcctacgggacctcctcctcccaggacatgggcctcgaccgccgccgcttccaagggagcatggggtaccgccctcgccagcaaggaagccgctagcagcagtgctgccgcggccgctcaacaacccgctcaggccgccgctcaacccgctagtgcccctgctccttctcaaccggccaagcagcaacagcaggccaaggccgctcccaaggagcaacaacaggcgcagagtggagccagtacccctgccgcacccggtcaacaggctttgggaggtcatcccgctggaaagtaccccttgctggacgccgctagggtcgtcagtaccaacatctgtttcgtcaaggtgagagcaggcgtgtctttgcaagaatgcatacaaccaagtcgtggtctctgaggctgatatgctcgatcgccgtcgtcgacgttcgcagttgaacaactggcaatcgcaggacacaacccctcccgtctccgaggccgtcctcagcaacacgctcggcaagtacggcgagatcatcaaggtcgactttgtcaagaccaaggcgtgcgcgtttgtcgagtacaagtcggtcgagtcggcacgaaaggccatcgtcgcctcgttgaagacccaggacggcggtgagggtgggatcaggatcccggccgaaggcggtggttaccaaaagatcattgtcgagagcaggaaggaaaaggaggatcgaggcaagggagccctccccggcgccggagctgcagggcagggaagcgcgatcggtgccggtggccagaccggtggacaaggatctaggaggcagggtcaacagggtcagggaggaccccgtggtggacagggtgccggtcagggccgaggaggtggacggggcggacggggcggacaacagggtcagggacaaaacaggcctcaacaacagcagcagcaacagcagcagtgaaagggtgggaaagagtgtcgaaccctttacgatcccctctccctcgagcgatcgggagaggatgaccggccgtagcaaaaaaaaaagcaaaataacgaactcgcgcatcatacacccaaacccctttcccctacgtcgccttcccccaacctcacttccctcttgcttgctcattccctcctccacctcaccctcgccgcttctttaatcccgcctgcctatattttctgctctacgccatctccttgtctacgattcttcgcacgtcaggggcacttttgactctgttgttgcaaggtcgatgtttgcgagtaggataacgggcataaattgatgaaattgatgacattcaggtcggtatgcactgacgaaaccatgtgcgtacatgtgtgtgcttgtgccgctgtggatgctagagtgcaagccctgactgaacgcgtcatgtgatcaagtcgagagttggtcatgtcacgtgacgctttgatgattccggcttaacttgccgctatgccacgcgacaagtctcgggtcacaagtcaaagtgtcaacaaatacaaagcgaacctctagatcaacacaaatcaaacaaacgatgatggtaaagatcaatcgtccaggtccggtggacgactcatcaacagcccatcgacaatagtcctgaccgccatcaatctcgtagcttgtgaatcgatagctcttgtctttttctcgaaccgacaagacgacccaagaaggcacgtgctgaaccagcactcggtcgcaacgagaggtctctgaccgtctctctcggtaagctttcgcggcttcgacacgcctacccgagccccgaagaaaagagagatcaagctgatgaacacatcgtgccgaaaaatttgatagaccatggcgtctgcacctagtggtacgtctagacgtgcgagccagatgggcgacgggctctctggactgcccaacaacgcgtacaaccagtcgaatcgcggagctcgattcgccgcccgatcagggcaatctcaacatggcaactccatcaaccacgtcaattcgtccatcacgggtctacccagagccgaggcaggatacattggcagcatgtccgactcggatgggacgaattacggagacgagggcgatatggaggaagttctggaagacctcttgaacccggtctcgaagcagctcgattttgccagtcgattagggcaggaattggtcgcccaaaggagcacacttgaagagcttcagattcgatggcaaagtgccagagatcgtggagaggtggataccgctaaggatatcgagagggagatcaagatcaagagggacgagtacgcaggcacgacgattagcaggctcaaacagattgccgagtctgtgagtccatccaccgtcaatccggtgttgcatcaaagaacgctttccaagctgaataccacctgctcgcgatgctagggagaataccccttgcctaaatctacgctggtgccccaaacaccttctcgatcatccagacgcaagatcgaggacgatccctttatcgactcgcgcgtctctgctcggcgaacccggatcaatcagacccctacatcggcacgctacatgtcgttccccacccacgatgtcgagaaccacgacatgagggatccggaagaagcgtctgtgatcggcggggaaagagaaatgggattcttggtcgcaggacacatgacgaccgaattgagacgattgatggcgttgttggcggaaaaggacgtcgcgctcaaagaggtccaggaaagggcaagggtcttgggggaggaggaggaaagtttgagaaagaggctagaaatgtccaacggtagtcagggtgagtttcgagcgagtcgtgccgtatgtgatcggaaactgaatgagaggacacgccagaacgcacccaggaacgtatctgggagctggaaatggccgaacagacccttcgaaccgaaatctcgaccgctcaagccgctctgaaaaagtccgagaacgagttgaagaagacggccaaggaacgggacaatgccaggagcgaggccgagacttacaaatccgagaccgaccgattggcctcggctgcccaggcccagaaacagcattacgagaccgagattgcaaagttcaagggcaaggctggtgcattggaaagggacaagagcgacctcgcccaacagctgcaacgggtcaaacaacgcaagagcgtcggttctggattgctcggatccggcgggagatcgccgacagcctcgccgtctccgcatatgctcaccccggacgatgcgaaacgacgcgttcgaagcgggtttgccgacgacgaggacgtttttggagctggagacgaacaaaagcgacgcggaccgggtctagatgcgaatggcgatcctttcaacccggacgatatttacggttccgactttggtgattcgccgcataattcggcgtttggtaccgaggccagggataggagtccgttggcgccattgcccgacgtcaacacatgggaagatactcaggcgcgcgtgatcgagctggaagaagaattggccaggctcaaggatgagcaggctcgacatgaaagacgagattcgcctgccgtgggtccgacattcgactcgcctatcgcacacatcagacggggaggcgctatccgagggaaccctcgggccgtctctcgtggtgtgaggggtattcgagccggccgcgggggagcgagacgaggaagcgtcttggcgagatactcttctgggaccgaaggaacgcctagcaattactctgctagccccgtgcgtccgtctcccttgggcagtggaggatactcagacgtatacagtccggacggcatcaatacgcccgccaggccctcgtctcgcttggcgcaacctctgggagactatggcgacttggattccccagactccgctcgaagcgacacatcggtaggcctagatcactcggaagaagttgtgcttgctagggatgcgagcagctttgtagaagctgctgggacgctcggtgatgagctagcggactttgaggacctgaccgaggagaccgctcaaatcgaatcgacctatgtcgacatcgggaccatgacggatccggtcgagctcggcacctcaggggtggatgccgtcgtcatgactctgcctgacacagatgaagatgatcagattctcgagacggtaaacagcttctcccgcgactacgttacgccgaccaattcgtcgttcgccttgaacgctcagtcggccacttcgacgttcaacacgccacgtgctatgcctcgatcatcgacgatacggggcgtggcccgaacattgcagcgctcggattcagatactactatcggtcccgtcgacacggagacggagggggaggagaccgattatgaagacgctagaagcgtcgttaccatgactgctagatccaccacgacagatacagactggcacaccggagccgaatcaagcgctgatgacgacagcgaccgggagagcattcgggcaccacacttttcgaggtttagcactcaaacgactccccgtatgtccagtcgtgcactagccgcacaacccgaacccgaggtcagggaagtcatcagggagatccaggtcgaggtgatcaaggaagtcatccgcgacgttcccacaccctacgaggtcatccgggaagtcgagatcatggtcaacgtgcctgtaccgtacgagacaattcgcgaggtcgaaatcatacgtgaagtcccgacaccatacgaaaccatcaaggagatcgaagttgttcgggaggtcgagatcatcagggaggttccgaccccgttcgaggtcatcaaggaggttcccgcgccttacgaagtaatccgagaggtggaagtcatcaaggaggtacctatcccagttccgtacgaagtcatccgccatgtcgacgtcgtaagagaagtaccgacaccgtacgaagtcatcaaggaggtcgaggtggtgcgcgaagtacccactccatacgaagtcatccgcgaggttgaggtcattcgcgaggtccctacgccgtacgaagtcatcaagctagtcgacaagctcgtcgagatacccatcgaggtctttcgcgacgtctttgtcccggtaccgatcgaggtcattcgtatcgtcgaccacgaagtcgtcaaagaagtcgagcgcatcgtcgaaaaggaggtcgtccgagaagtacccgtgattgtcgaaaaggaggtcgagatcatcaaggaagtacccatcgaccgcatcgtcgaaaagattgtggatcgcgaggtcatcaaggaggtgcctgtcgaccggatcgtcgaaaaattggtggatcgggaagtaatcaaggaggtgctagtcgataggatcgtggatcgggaagtgataaaagaggtccccgtcgaggtcattgtcgaaaaacccgtcgatcgagaagttgtgcgggagatcccggttcaagtctttgtcgaccggcctgtcgatcgagaagtgatcaaggaggtcgagaggatcgtcatcaaggaagtccccgtcgacgttgtccggaacgtcccggtaccattcgagacgctcaaagaggtcattgtggagaggatcgtcaatgtgccggtcgaagtctttgtcgaccgtgaggttgtccgagaagtcttcgttgacaagcccttcgaagtcatcaaggaggtcatggttgaccgacctgtcgaagtcatcaaggaaatcgtagtcgacaggccgatagaagtcatcaaggaggtagtgatcgatcgacctgtcgaagtcatcaaagaagtcgtcgttgatagacctgtcgaaatcgtcaaggaggtgttcgtggatcgtccggtagagatcatcaaagaggtcatggttgaccggccggtcgaggtcatcaaagagattatcgtcgatcgaccagtcgagatcgtacgagaagtcgaagtcctcaaggaggtccaagtccctgtggaagtcgtaaaggaggtatatgtcgaccgacctgtagaggtctttgtggacaggccaatcgaggtgattcgcgagatcgaggtcatcaagcaggtcgatgtcccttacgaagtcattaaagaggtcgaggtcgtcaaggaaatattacgagaagtacccgtggagaaggaagtgattcgcgaagtcttcgtcgatcgcgaggtgatcaaagaggttcccgttgaccgagaagtcgttcgtgaggtctttgtcgaccgggaagtaatcaaggaagtacctatcgatcgagaggtcgtcaaggaggtgtctgtcgaccgggaagtgatcaaggaggtacctgtcgaccgagaagtcgttcgcgagatcttcatcgatcgtgaaatcatcaaggaggtgcctgtggatcgagaagtcgtcaaggaggtcgaaatcgacaggcctcgggccgtacacagggatatgaggacccagaccgatccggtatcatccatgtcaacaagcttgagcgcccctgcccctgatgttggcctctttagagtcacttcgggatccaacatggacttcctcaagaacccgcctctgccatccgcatcaagtagtaccttcggccgaccgatgatccgagtcaaacagcgatctagcagtccgagccgatcagtcaggctggctgctggtgatcgcgacgaggtatccgagtcgcaggtcatgtctcaccccgagcacgcgccgacgtcgcccgtcatttcgattcgctcgattggctcggttgacagatcccagccgccgatgatgtcgctcccacctcctccatccgctccgccacctcccatgctgccctccaaggtcgtgtcaggcttgcctcttgctccgcccttggcagatcttggtcaacacaaccgagccaagacacctatgagcgccgagttcaacaagccaagggcctttttgcttcctgaaaacggttcgcgaaccaatgcgaacagtatgcccccaccttcagcatcaagacagacctcgacggcaagccttcgatctgccgtgaacaacattcctacggacgagaaccgatacggtactcgcaagagtatcgagcaaagtcgagacggcgtgaagcgactagcagacgtcgtcgttgggggtcgtccgggcgcgcttaaagcccagtccaggactgccagctatgcatcgtctcggtcgagtgactatggccattccaggatgccaagcgggctcgctagagagttgggcatgccctcgtcgagtgatccggccctgatccaggccattacccaggtaatgattggagaattcatgtggaagaacacgcgtcggaccttgggtaaggggatgtccgagaatcgacacaagaggtttttctgggttcacccttatgtcaagacattatactggtctcccgtggacccaggtggtgaaaatacggcggaggctcgatccaagagcatttacattaccggtatcaaggtgatgaaagacggaggcgcggcggaacctggcacatggcacgagagtattatcatctgttcaccaacgagagaggtacagatgacggccatgtccaaggaccgacacgacgcttgggtcaacgtgagttggcgtgccttccagacgaggttgtaacagattactgacatgtgtgaccgctccaggccttgctgttcttgtgcgagcgaccggctccttcatctcgcagagagcgagccagtatcgtgcccattgaagctttgacgacgcccctgaggaaaccgtcgcgaccggaacttcccgacgactttggtcggcgcaaaacccctcattctattcgtagtcttaacacctatgctacagaaagtgggacaccgcgagcgggagatggaccccgaagtcaatcggccatgtctatacgatctaccgttcgagggaaacggccgggaactcctgcgcacgagtatctgtcgaggctcgatgctggtttaccggtcgatgggttgctaagcgtgaacgggcgcaagagcgtcagagacgatcacgataccctgcgatacggtgagggaaacgacactgtcggcgactttgaggatgtggaaaatgttcgaggtgagtcccgtgtccaccttgactcaatctaacggcgggtctgggctgacttgtgttcgtatggcgatcagcgtcacttgaaggcgaccgtcgatcggtgtctggcaagagatccctggctcgtcagcgcgatgccggctcgtctcgccgtccttcggtcgcatctcagctcacggcgccgtctcaaaattctcgctaccgcgccccgcgctctccgtccgcttggtcataccgaaacgaacaaagacgaggaagcgagtggtcagagcaatcctccgttgttggagacgacaccttgacgcctggcaagctccgccaggtgtcaggggaatcaggcattcgtcttccgcccatccctccggtccctcgggatgcccaccgtgacactgaggacgcgggcgcgacccccagcatgaagagccgaaaaaagagcttgatcaagaggccgagcctaaatttccgaggattcggttcgaggtcaaaccggtctcagagccgacccaactcgccatgagggcagtatcacgaatgatgacgagacgatagagtgccatgtactagtacacgatttcggttttgagcgagagactctgagatgccatgaatgtgtgaatatgactgcgcagcgtcgtgaacaggcgataagaggcagagcgtgccaggcatgttctcgttgtcggcggagggcaggcgttgtctgatctacctgcggcgtcgaatcgaatctattgctatgaattcagcgcgatctcgacccggaatcggattctgttctcgatactgaaccgcgcagcagcgacgaacagcaagagacctatttagacgacgcccgcctactatcctgagatattgcaagagcgcttgattacctcatgttgtcgcttcgtccatatcgctatatttagcctcgcccaagcggatcaactttccactatcacatataggcacggtcacagtctgccgtttcgcaaggcccatccccttcaatatgtccttgaattccgcctcaccatgtcgaagcctttgtctatcagaccgtgagaaggcgactcttcagagggtgacttgaattctggtattatctttctgaccgcctttctgatcctcctaggcagctggctctctttttcgttgtcgtcggtcttgtttcgtttaagcttgctgctcggacgcatgatctgcaggcgatgtttgatcgcggccgtatccaactcgacatgacatgcaactcgagatgagtggggatgacgcgcactattgcaatgtgctcaatcagaagttcggcgatgtgccccgtgatcaggcctgactgtccctaccctgcgacttgtggttaaagagatagagagcaatcgcctacaaagacttggactcaaggcagtggcgtaccaaggcgaagatgtgggatccgttcccgcgctgggtcggtgcaaggaaaatcccaaggacgatgcgtcccatgcactatcaatgccccgcctcgggtgtgtaatcaccaagaacctaatttgatatgcctcaaacgactgagcgcacaacgttccgagcaaatcgcgagccaaaacgcgcttcagcgctgcgagatgaaacagaccaggcagatgcccactcgaccagatacactaatgactcccggtcacaccaaacaacgtgttggagcatgcagagctggatggagatcgtatttatagaagaggaatggcgggatgtaagaacaggggaaaaagacgctgtcgagggcaaaaagttattgccacctttgtggatcgaacacaagaccgcacgaaatcgaagatataatcacttcagtcgtgcgctctcccaactgagctaaggtggcgattgatgtcaagttcacagctacatattatagacctgtcaattcacagtctgatctgctcgatctggtcctatgcaattcccggcagcatttttgcacggacgtacgagtagaacgtgtcgcgcgacaagcgatgtcctatgctaaatgttccgtcctaacgcgccctttacagtaccagaagggagtctctatagtcgcaaaagacagcacagtcgaattctggaaggttctcacccttttcgacctacactctaacgaccacggcttccgtcaagtgattgaccggcgacccgtaccgggtttgacgggacgatcaaggcagattatgttcgatcgtctacttgaaaggaaatcctccgctcactgacggttgggaacggttccaggtcgactcgtggtctgagtttcatgtgtgatgtccaactcgtgtgaacatgttgggtaggaagtccgtctgatatgttttctttggtgagtgtattttcgaaatgtccagatctgcgacaatcgccatctttagatccagtctccgttgcctgctgggtcaaaacatggcgatctgctccagtatcattacacgtttcgcaagcgctacacgcattgacctggacgcgcgcacaaagacatctcacagcactgcacgttctcttttcgtgccttcgatcagcccacaatctccctcacaaaagcttcccacctcatgattgcagtcttgaccacgcgctcatattcccagcctgacgagctcgctatcggaaatatttcctttacaaaccccgacgaccacgatcgattgttagccttcaattgaaactcctcggctgagcgttattgcccgctcattatgttcactcacctgatgcgacgtctggcaatctgcgcagtcgtatcgtctcctacccgtttggttacccatgctctgagcggcatgagcagccaactcgatatggatcaagcctagatgatgaggtttaattcagttcagaaagatcgagctccctgctcggaccacgttacccacgttccaacctcttcactgccggacaagtcggccggctgttccgatcaacaccaatacctccacccatagcccctggcagcatcgatcctccaggccccgcatcgtggagcgggaaaacatcgcgtagagtcggatggtgcgaagtgcaacctgaaaacatccctcgacgtcagccgtacggcgcaatccctttctggcatcctaacgtacgcttcttccactcgtcgagccgtctcgggacattgtcggttcgcccaactttatagaaagccgtcgtgctcgtttggagatctttcaaaaggccggtcacgaggctgatatcaacatcggccggtgtgacgaatccactaatgacgtccggctcacctcgtaactcgtacgcatagatgtatccctcgcactcctacaacagcgtgacgaacgtcaacgtgcgtgtctatcgagactgcggggcgaacaacaacgggcgactcactctgctcgtcaaagcactttccattgtcaaccgtagcaagaccttgctctgctcttccagttcctctggtatccagtccgaaaacttgatccacttctcgccgcgttgacctttccagtagaaaccctctgcttcgcagatttgcttgacatgatctcgacaatacctcggctcctcttcgatcaccccttcgtcggcatcgtttcgatcggaccgacgtgacgaaggactgccaaacgagaacgaatgcttattgacgatttccagccgaccgtctaccaatgccgcatatggcgaggccgttttgaccattcgtttgcatcgtcttccctgtctcgtgaacccggaacattgtcgagcagatccagtaatagcattcctcgcaggggtgttcggtgcggagactggtgtaccgagattagagttggttgtccggttagaaacaggggtgacgcatacgttagaggcaaacacattgtcgtctcgccgcgttggtgaatagtggtgaatcggggagccgaccaggttatcgcggtgtgtcggcgacaaggcagagggcttgaacttgggcggcgttgagaccggatgagagtgaagcggatagggctgtaacggtcgagtggattggtggtccgtcttcggtggatgtatgtcagatgtagtataagaatgcggcaaacatggctgaagctggtgcgtttgatgtggctgagcacgtgtctgatggaacgtcggttgggaatgactatgcgtaacatgcgcaagggagcgatgaccgccaggaggccaggcctgcgagctgaacacgtccggggcatagagtggcacctgttttggaggaggttcgtacttccggtacagtttggtagggctttttctgggacgttcgagtttttgcgccggcggctctctgatcgacaggtcgacctgctctggccgaggcggaataggaggaggcgggggtcttcgtttcctcgcatattggctgagcggaagggcgtgtggttgaacgagatggtgatcgctggctcctgatcgagctgatgtccgtgctgtttcatgatgacccaagtctattcctttcagtcctgatgacaagtcttctacctgataggacgttcggctgctgcctatgcccagtgatttgcgtctttctgcctctcgtctccctccagtcttccaccaccacttgaagccggttctggattcgctcggatttgcgcttctctccataaaccctgtctgcttcgacgcttcctcactttccttctgctgtgctggtagtggaggtagtgtcttctcaaagctcgaatgactagtaggcgatgctgtctcgtaggaggaatccggagaagccctccacggggaggatgatgcgggacggcccgtcggccttggctgaggaaagggcagcatctagtgcgaaaggttctcggaatcgacctgggaatacaccagtacggtgagcccctgtttattaaattctagatatataaaccggtctcaacatacatggagtattgccgcctttgttatagatcatagagtcggcagaccaaatcatgctcatggtacccacgatcagaatgcttccgacggggtcgtttgtttacaaagtgattcatcatgattccggaacctttttcaaaatcataaaccatgcaaagagctcccctctattccttaacgggctggctcatcccctggcttcgggtcgagagccgtcacgaaagacgagatgtcatgccgcagctatcaagataaaacttgaaccctgttagcaagctgtccaacacccggatcacgctgtagaaaacctacaattccgctcagctgtttcgagcagggcattccaccctggtacgctttcctgttcgcctccttcgagggtcacacccaggccttctgccgccttgccgagagctcgaatatcgacaagcatctgttgcttgaaacgttcctcctcttcctcgatggtcacggcggaagcgttgctgctagatccaaatagcgaaaaggtattcttcttgccctttcgatggcgtcgcaagaggtcctcggtcttctgcacggacaccaagatcgatgtgtatctatagaagagtctcagcatctttatcgatgataaacacggcccatgcgacttacgaattgacgacctcctccatcaccttgcgagaccacgcggcaccgacctcctcccgcagatgctgcccgtatccattcttcccaaaatagtcaacaagaggtttcaagatgttcgctacaaaatgactcggcttcggctcttccttgagctgagcaggctgcagcgtccgaagctgcgaagcgaccgatcgaacgagcttgagaccgtcggtgcatcttcgggtaagaatcgcaacgatgtgactagatggaccgttaaacagggaggatagcgaggatagtgagtgatccagagttgctgatgtggggtgggggggggaggataggtagacatcagcgatgtctcatcgtcggtcattctgctgctgatccactcactttgtatccgttgtacttcttccaggcccaaagtttgttgcaacaacccatgtatccgctcgccccaaaaggccgagatctccttgtgaaccctgcttaggtccgatgctatcagactggcggcctttaatatttgctcttctgcctgcgctgaagcaggatccgcgctgggatctccggtaggaagcgatggcccagtaagactgagtgatgggcgaggagcgctgatcgatgtacgggaggtggttggctgaacaaagtagaaggggatgatcaacatgctgcctctggttggaagcaagctcttaagctgacctgagaaattggctcatatagggccggcacggaagcttccaaaaaggtacggtaccgactgacgatctatcgaaggtcggagattagttacatggcaggccaaaactgcggtgcagtggcaaggctcacctgcagagctaatcgccagaatcggaacgacagctcaggaatgtagacctccggcaaccaacagttcttgaaagctgtcagagtagccgctgtctgtggtaaggcgtacccatcccgccctctctcgctagctatgccagcctgtcctatgacgagtccatcttccagctctttgacaatttccttccaccgaagttggaagtagacgggaagttgccacctcctctcaaatgtgatatacgcctctgtcgagcgcatcgttaccaccgccggcacagacaaggccagattctctagctgctggataaattcatgcgctaaggtgtagttctggaaggttgagtcttagtcaactttggaagtttggagcgaccgtcatggggggtgtcctggcttacctggtgcaactcagtcacgcgaccggcagcgaataagactccgcccaattctgccatgaccaactccgctaccggtgtccatatcgagttggccatgaattcaaaattggcttcaggtccagctggtcgctcagccacttccgaggaatcatcctccgcgtcagactctgggtcatctcctctcgctttcgaccctttaccctgattccgttccctgatcttttcgcctaatttcaacaactctagaaggttgccatctacgtatcgcaagacattgttgaatatggttgcgatcggcccagcagattcatccaataatctagcttccgtcatctcattgggtagcgggaatgtgtcggtcggaccgacgtcatcctgcctcagggtagtctcaaaggggttcgcatcgaccgatttgggggcgagactagtcatcgtcattggtgtgtgcggtgccatcaggccgggagagttgggattcacgtctttcaatccaaagggagtgctgggaatcgctggtgaaggggccgttgtgagataccgggctgtgacaagctatcagaaaattacgcaagtcagcgggatcaacagaaattgctggatcgaattggcttacgctgcgtattccatcggaaacgaggtgcttcacgacttgctccgcttctctccagccttctatgatattgtatacctccagacaattgcgtagggtacggctgttctgatcggcatccgagactgttcgagatcgttgcttttgcaacgtcgaggccaatatccgcttcagattcgtaaagagagcttgacgtatcacttcgattctctgcaatgtcccatcagtcttgcgagacggtcttcctccacagcatagagactcacgctattgacggagccctcttcctccgagacgtattcgcattcctcagctcgggctttcgtgacaaggtacatgacctgggtgtattcgttggctatccgtgtgatggttttcatgtctttcggtacctcctcgtcctcttcacctgcatctataatgacggaaagtttcggctttccgtttcgagtaggactttgtccagcctgttgttcctcgaatagccctcggacaggatccacttcggagtttcgtatcccgagtaacccctctgttcgggtcaaactttcgctgaggtgaagaagcgtatcaagtatagccctctcctctcttagagatgaacggtcgtctagcttcgtttgcaaggttgtttccgatccatgtagctgagtgtgaatgtcctgcagtcgcgatgggatggctcagttccgttccggcctataaatgtcggaaacggcgggacataccttcacctccaccttaagagcctggagtgggtatttgagatcttccaagcgacttccttcccccctgagacccaatccgagactgataaactcctcgtagtcgtcgttgatgagcccgccaagctcctccttcaaaacgcctagatattctcggagctctccacggagctcctctagcggcacatgcagtcgggtcagaagaaaatcgtctacactccattcctcggccgatgcagatagcatgggatggtcgtgcgagagaggtagaaggctagggaggtccatacgtctcccttcctcggtgatgtcggacaccgcgtctctggaagatgtcgaccatcgtggaggggcacctgttccgtctcgctgctccggatattggacagcggacatgcctatatctcgaagcttgtcctgtgtctatgcgatgagtcctccttatatcgtcaacgtgctccccgggcactgaaaacgcacggctatatgacctgcaagttgcaagttgcacgtagctgtagctgttccgtctgtgaccagagttcggaagctaaaccatgtccggaaacaaatgtccaagatctctaccgaaactcatcgatgcgtttcagccagcctagactcgggtttgggagcttgatgggacgatgcagatgatcgtctgggctgagatcatctatgaataattcggttgtcttgtttgagttgtggtcaagaagctctacatgcagtctgactagaggcgaaccttgtcttggtgtgtaagtcctgaactcgtccatatgtaactgcgaaaacgagttatgcttgatcttccggcattcacctctttgggtgatatcctcatgcaggatctctgcatgggagttgaccctaaatatcattttcagcagccaggctgagagggccggctgaagtggtcccttcttgaaaagaacctcatggattttctccttgagaaggacaaactccatctcggcggcggtcttttcactcgattcggcaagcaacgcgtaaatccgggctagctctcccctcaacttcgagacggggccagtctcaacaactaaaaacatgagcaggtttgggtttgggcaagggggacgtcaggtcgataacggctggggcagggggaggtggagcgggaggagtaggagcttgaacaggagttgacctgggaggggtcctctcacaactgtcctgagcccgatcagagtggcagggtcaggggcaggcattctcgtaacccgcctgttatgacgataacggctgttatcagggcctgctgagtaggttcagccagggaggaccatgctacggctaagtaggtgtccagtaaccaggccactctcagacctgtgtacagcactatggatgacgcaactacgcctgcaccgactgcacggcgaatgggggacttctctctgcgcatgtcctgccgtatgtcacaatcacgtacttacgagtacgtagacaccgatgtgactgactatcgagagcagggtgttcacatgtactagctcagagaaacatgacgcttacgctcccgctaaacaagagaatgtctcaaacctcacccttctggtagtgataatgggttttcttgacgaggtagacttcagcggtgcaggaacaaaatccactgaatcttggaggaactcctcggtaccatgtcagtgactgtccctgatgacctcagtatcgtccttgaagcgcgaattagctcacaactgcaactatccctcgttcttatcctttgccacctgatccaggatgatctggttctggcttggggtggctcgatcgtgactggaatgcgtgattcctgaagtttcctcaccgtcgggtcagctcccagtcattgctcaacgctctctcaaaccgatcaattcgaagactatcgttatataatcgtcgcatttagtgctcggagtcttcttgcatccactcgggcccatagccatgcgatacaccgaacaatcgatatcgtcgatgccctgcatgtaattcatccgacgagcagttccgagtcaaatggaccagggggaaggatggttgggaaacgccatagcgtccattctgctcaagattttcaagccacggcttttctcggtcaaaagtacaatcagactcgctgtctcacctaggcgaggctcaatatcgctcacttccaaggtagcattaaagacacaaaatgtgtttcggtctcgcatgggtcgtcttgattagaggtcctcgagctggaaacacgacaacctctgacaggtctgtcgcattcagatcagtcacacccagattggtcatctctggatctctagaccggtcacctctccatgcggtgagaggcgagcgggctccgtctcatacgacgccttgatctcaaaaagcgcgcggtgagctgagaacggcaggaatcatttccgtgtacctgggtaagcacaccaggcgatcgggcgtgtacagtgtaaagcgtcatgtacatccccaagttcagtcgtcggacagattggcttgttcgaagcaagatgactgcgactcccaatcgtctctccgttggaccgctggctctcgagaaacgatttggctatagggtcagatgactgcctataagatcagaattcttcaataagccagtagcttgggtatccgccgaagaaaaattttctggccattgatacggatcgattgttggtataagcattgaggtcggagatatatcgatagttgtacaaaagtagcttcattgtcggagctgtctctctcggccgaaagccggtctcatgtcggatcaatcgcctgaaggatagatagacaagaggttgagttccgatcccgaaaaaggctagagattaagtctgcgtcaacatacctcgcaacttctgtactcgcttgagtacggaatccttcgacgggtctggaaggcaacacggcctcgcatcaacttttcatgccacctttcggtccttgcatgcattactcaccgtacgggtggtccttgctgggaatctccagcaatgcagggaaagcggcttggtacctgtccacggtgagacgaatcctgtccgcgacctgtccgtgtatcgataccaccggtaatcatatcgattagcccccttcgcccggtgacgaaccgtcccgtctttgggaatcaacgtacgtgttggttgatcagaaggatggcaatatcgggcctctccgtgtactcctgaaaggcggattcgatcacggcagtcggcgtctctaagggaagcgatcgacgctcctcatcagccgacaagtaccaacaaagccatgcaagacggtggaacaagactgactgccgtctacgatcaaaaagttcttcttctgctgattatcgacgtgtccgatccctgcgagtaacaatccggtgatcgagtcctacatttgatcgagagatcaacatcggcacaactaaagtcagttcccggtcgtattcttgttgtggtggttcattaggggtttccaacggacctcgtctccgatcaccgcgatcaaagtccgatcctttgctgtcccgctgttagacatgatatattgaaaaggtttttgtaaagatcggaacaagaacgatgaagaaagggagaacaccgtcatctgtcaagcacatcagcatcgaacgtatcgatactcatcatcaggtgggctcgggcggctcgggcagtgacgatatcactccaagccggccctggaatacgcgtcgccctgaccagcgagtcgtgcaagacgtcatgaaccagaatcgaaagagggcgcaagcccaccgccacacaaccaggcctacagacagccagtacatcgagcgaacacgaacaaagtcgattgggggtagatgttgtaatgtcatctcgtcatacaccatccggtatcattaacaagacgcgtcgttccaagggagaagggtaaaaaaacacgtttgttttccctcgcttaggcgacgatcttgacgacaccaccggcctccttgatcttctgctcggccaacttggagacgaatcgggccttgacgatgaaaggcttgttgattcggcccttgccgagctgtcacacgcaaagggcaagcaaggtgaggttggtgagttgcaattcgaaggattagatgcaatgagaaaagagactcacgagcttgtgcctgttgagctggcacaagtcgatgacggggacggtgccctcaggggcctcgaccttggcagcctcgagcgagatgagctgcaaagagacggtaaaaacgatcagctacggtccctcacagacgagcaactcttctttcgactcaccttgtcgaggttgatggtaggtcggaaagagtgggcgggcaaaacgtggtagtgcctcataccgaccttaccgaagtaaccgggatggtacttgtcgaagttggtcctgtggtggtgctgaccaccggccaaaccacgacctcccggatgctttctgtgctttccgacacgaccgtgaccggccgagacgtgtcctcggtgctttcgggtgttggagaatcgggtaggcattctgtaattgtgcaaggaagataatggtcatgtcagtggagcgcaaaaagagaagcgttcgcctggcgcctagggaaaggaagaaagggcaaagggaggcattgacgggaggaacgagaaatgggccacgaatggggtatcatcgtgtctgctgctgtctgctgctgctgctgatccaacgtcgtcttttgttgaggaattgcaagccgcctaggatgtctcctcggaatggtcgattccgtattgaggatgcctcagataagctgatctctgaagaattgcaaaggctccgtcccactagtcgttgcgaggtggcctgagaggtcgactgaagtaggcgctgccagccctcatatgatgatctccacatggtagcaagtgctcggccaacagtagtcgaaaaggtcaccatgacctgcgatcttgcaattccatctcttgtaccgggtccttcctgattgatccagtcggtccaggtagtagggtgatagcagcagcagcaggtagcgagaacgacgataacccattcctgacacatcgtcacgttccctgctaaagaccttttcaagtctcatccgaacaatcacactcccttcgccagttccttctctccaccgggtcgatcctagacttttgcggggatggttacagtacgtacgttgatcgattccttgttgtcggtccggtgagagaaaaagtctgttcaagatatcgacgattctgagcagtttcaattcaaaggtcgacttcagggtgctgggttggcacggacagaccgtcggtcgatggaggagagtgaaaggtgagaggtggtctcgcgaggtgaggtgcatcgcaggctggcaggaaagggtggggagcggtgagaatttgcaatctctccttcgcccgctggcccagtgacacgaagcgcgcgaggaaaatggggaagaagtccgagtatgcgctttgatttggctggcgcggtaggacgacaagtctcgctctccgctgccagtcgcgactgacccgagtctgcatggagtcgctaggtgacgaagaccgatccgcggattggaaactgtcctaccattgccgtaaagtacctaggtaaaaccgcgaacatcgagtctcacctttgcatccgtgttgcgtgttgccgctcagcggtggtttgattagggttgttgtgcaatcgttcatgtgacgggctcatggctcagtcgctctcgctcactgtgccgtctcacaaatctcgttaaagctcagacatcttgctgaacctcaagtgcgatcatagtcgcctacggtccaggaaacagcctgtccggtgttatgatctccggatagtcaccttgtgatagccagcctgcaaatcctgtacatcacgcacaccgaattgtaagtcgagcgtcgcctccctttttctctggtctgttccatctccgccacctttcccctctcctccatctatgatgttttatatttattgtctcagaagtggaccccacattcatcccctgaaaaaggggaggagtggggttcttgattgacagcctttagctgatacgcttcctttcgacctttgtgcctcgcgattacatcaaggaacggcccagctgatcgtttacatttcgcgcttttggctctagacacgaaattacacacgacattacagaatatgcaacgacagacccgcgactcggcggggaacccagaagagctggatggcctggagacgtttaacccgcacggacaagcttcgaccggctttggtcctgatgaaccatcacgggatacggataggaccatggtggagaagaagaaccgcgtagcgatcgggtccgcgttcgatcaagagggtcgggccaaggtgttcaggtgggtctcaccttgccctcgaccttcatccggtgagtccagggacgaatgggctgagtgtagtatcctttgtctatcccgtacgcccgatcaatgtatcccatgtgtgaatctcgaacattccataccaccgtattccgtgtcatcatcccggtcttccaccgacggtcctgacggcgcgatctgaagccccccgcattccgcttaccctctgagtgccaacccgtccgccatgatgcattacggctcggaccctacgggtacgctcggggtgcatcatccgaaagaaatcgtccgtatcgagagggactggagcggaccggcgggaggacaggtctgtcagttttacacgagttgggtcatggagctcgagggcagggtgaggctcgtcccggtcgatctctcccatgcggtgtgcgtcagatcgtcaacgtctcccgtttcgatatcgccctttcaggtcacaccgactcaattccaggctctgatcaacacactcaatcatcacctccaattggccaattctaccgggtcgacggtctgggagaacatcctcgccgttctgacctggcatacgagtttgatttggtataccccgcggtttgaacgagtgagcggcgccagagtgaacggacaagtcccgcggcctcgatcatgaactctgactctgcctgactaggaaatgagaaacgtcgaaaaagtcatcgagaaggcgaacaccgagttgtggaattccaagggcttgaacattctcagtccgcgggatgtggcgttgcaatatgtgagcgtgccatgtcggctctccgagcgggatggatgttggtcgtcactgctgacaacacaccttgttcggccacccgattttcagctcgaaatcgagtgagtactggatgacgctgtacgaagcgtcttgtttttgacacagagaaagcgttgtccttgcagatatcactgaagactggtctcatttgcgcggttctcagttcgaatttttgcgatagacatggacattacagacttgtacttgtatcagaaggtacccgagagactgagacgcgatccatacccttgcaagctttcctggtattatgggcgatgtacctgcaaggtttgagcctgcctttcttgttcgctccgactgagaccttcatcgacgcattgacagagcgttggcgcggtcaggggattccctatgcaaggaatgcgtgttatgtagagggtagtgctgaatcggtgatcgagggatagtcaagtgaggccagcatccgaaaagtcggctagatgggttcaccgcgatgagctttcagccatgcaaggatttccttgatgctatatcgctccatatagtcaacttgatcatctggagaaaggctgttcagcacggtcgttgtgaaccggtctcaatcagaagctggcaagggaacattcttgttgtgaggtggtcagctgcgttaatgaatacagaaattagaagtagaactgaaataacagggtttgtcgatgtaataactagaactcctgagagaactgcaccaaaagcaacaaagtctaatataaggttgttattgtcgcaacgtcggccgtttcttgcaacattctcccgcctgctagagtccacacaatgctctcacgatcatacatgcatgtagagtgcggttgcatcatatctggtgtctcgggcagggatgccccacggtattggttacgattaaatcgctaagctctcggcaccacgaatacggtggtgtctcactgaactgtcaggtgatggtcgctgcgttgtgtgatcttagtgacgcaagtcattttgtgaagttccgaccagtctcgacccccacatagcgtagattgaaaaagttatctgaggccagtgcgagcgattttctgggcgatgaggcccacgagacaacgaggtttaactcttaggagaatcccttggatcccatcatctagcgaagttcagtcgactgacgcctgaagcacgcagactgactgatgggcgagacgtaccttgctgtgagcgagccacctgaaactcaaaggtcgactcggcgtgcgcgtcgcctttgcccatcatcagatcatgcagagctgcttgcagtaaccttctcatggtgatacactctgttcgaggcaagacttagagaccctcgcagatcaatcaaaccgggcctgttcatctttataggccggcctaggactcgtccagcgagaagtcgacaactggctccacccagagatcagtctcatcgcaatcggaccgtctcatctagtcgctcctcttgaatttgactagcctgaataggcccagcggatcaagatgaatcacccggatcgtgtagcagcatggttggtcgacccggatgacattgggcaactgccgtgagtctgctcgtcgccggtcacgagcacctactggagactgagacgctggtcgtggggtgtttccccgtcgtagaatggagatcacggacgttgacaatcagctagggaaatcgatcaaggtcatcttgtttgctcaggatcatactattggtaacctcatccggtcgtaagtcattcgggtggcgccattcgaccaagttcagcgacgattcaagcgggactcacgttacctctcgcactggctaaatcccgtcgtatacgataatcatctctgaaccttgtgtcaacctctttgtcacattcacctcaaaacccagacaactcctcctcgaccccaacgtcactttcgctggctaccgaatccctcatcctctcgataacaaggtcgagcttcgcatagcgaccgaccccaaccccaaagacctcccttacgtctccccgcgaaaagcactcctcaacgcatgtactgccttgatgctcctcacaaaacgtctgaagaaggactttgaagagcaaggcaaggcctttgaaatcggagcgggagtcggactgaacatgggccaaggagggaacttgggcgggatgagtcaatcgggaggcgggatgggcggttacggcgggatggacggggactttgggtatggatcgatgccgatgggagcgactcaaggtgcttcggcagaagacccttatcagtactaagggatactggcgggtgcaccgggtattacggaacggtcccccacactggatgatagggacgtcatcctcgatcagcgttgtatcatatcgttctctcttagatgtaaccacggcctctccatgaatgcctgtacaccctcgactggatcgactcgagcagactcatgcaccagatctgatcagttcgctcggtcctttaaatagctcgggatagacgagtcttcgaacttcagtgagtgatgcgatgatattttccttcttgtacatatgtgaactacaagttcaaggggtccagtcctccttgctggttggtcatcgaacttcgctctttggagattctcgagacgtaagacctggagacctggtcaaaagcggccatgtacaagccgagacatcgggagagacaggtctgtacgaacgaagaaagatcgaggtcagggattcggcgcgggtcctgcatggtgggcctcgtgagcgaggatgactggacatacctcttccgacgatccgagcgaagtcgaaggcttggtcacacatttggcaaagcactgagtcgtgaaagaggttcgtagcatgattagctgatgggtcccacagagaggcgagagtgacacatgcgcgaaaactcacgttctcgttgattttctgttcggggtcaacgacggagccgattggattcagctttctaacatgtcttgcacagaaaagacgacatgactctcacgttgatcagagtttgagcgttagcgacggccaactcttgggtgatcctctgcttgacctcttccttcttggtctgcatgtccgaggcggtctgagcgtttccggatgagaagaatgacgacatgatgggcggttgtgattgggacttttccggtttgattcgaatactagatcaagtgttttgagatgcaatatgtgagtgtagttgtcagatcgatgtctatctgaacgattcgagtacaagtatgatcgtatgagagtctgagatgacttcgcggatgaaatcttggaagcgcgcaggtcaaagttccgagggggaaatgacgaaagagcagatgcagacgagatcgcaagggatcaaccaatcgtccatgcatacatacactcccacttcaccttgcatccccacctatacttttgaccaccaggttatgcccttactgttgtcatcttcgctcgcaacagcagtactcatctcatccacttcttacctgatcgcccatatcgtccgggaaaacgcaaagaaagataaaaccaccgtcatcatgtctacgactctcgaattgcccaccgatttcgctccgatgaagaacgatctgatccttagagcggctcgaggtcagtcatatgatcgccatacatgactcgaacatcgtcaccatgctaaccaaaagcgatcgctacttttcaggcgaagagactgagcgggctcccgtctgggtcatgaggcaggctggccgatatcttcctggtaggcgattgttgaacgacagtgacacgatcgatcttcaaactgatcgcagttcccgcatgtgatcagaattcttggcggttaggaaagatcacacctttttcgaatgctgcaagactcccgagatcgcctgtgaattgaccatgcaacccatccgccgattcaagggtctcctcgatgccgccatcatcttctgtgacatccttgtcgtccccgaggctatgggcttgaccgtcgagatgaacccggctccttccctccctaaccccatcagaacccccgaggacctcgcccgattgcccaagtttgtcgacgtcaacaaggaactcggctacgtcttcgaggccgtgaacctgaccaggaggacgttgcaaggagaagtccccttgatcggattctgtggggcgccttggaccttgatggcgtacatggtggaaggaggcggtagcaagacttaccagaaggccaaggagtggctctacaggtggccagaggccagcgaagagctcttgtctcggatagccgccgtctgcgtcgacctcttggtcggacaagtccttgccggagctcaggtacgtgacatgcagagacccggaatgacccgcgaggtttccatatcatgacctgatactgcgggtctgtctatagatgctacaagtcttcgactcgtgggcaaacgagctccctccttcggtctaccaaaagttcgccctccccccttgtcaatttatcgcccgcgaggtccgatcaaaactcaaggaactcggccacgaacctgtccccatgacgctctttgccaagggagccaacacctcgctgaccgtcttggccgaagagagcggttacgacaccctcggtctggattggtgtatcgaccctctcgaggctaggaagctcgtcggaagcaaggtcgccctgcaaggaaacgccgatcccatgctactctacggaggtcaagaggccatccagaacgaggtcaagaagatgagcgagaggttcttggccggcggaggtggatggatcgccaacttgggacacggagtcactcctcaggtccaggtggacgactttaggtgctttttggaaagcgtgcacaagtacagcaggagggacacggggtcgtctgctgccggtttgagcgaaaagttgtaggatgtcagcccctacgtcggacacctgaaagggaagcactgtgacatggaccgatagattcaatcttgacccctcaatcgcaccaggagcgtcagtaagcgacaatggacttgacccggaaccgtttcgatcttgggaccttgtgacagttgcccctggcatccctagtctgctaacggtcagctcacccctcgcgagtcaggggtccacgaggttgcctcctttgatagtagtaagaatcgagatatccctttctcgcttcgtccgacgtgtcgcaaaaggcccacggtatatagggctgagattatggagatcgcccagtctcagatgaacaaaccaggcactcttgacaagtcgttgcagccacctcgagaagatttagctgggtctaatctttatctccatccattccatccaaacacttctctcctctgcttttccacttcagcttacgaccaatcatgtctccaaacatctcaagcttcgacaccaggggtatgggcgtgcgtgctgctatccctagcatcaacaccaacgtcaagctagcacggggaacgaaaagtgagatgatgcgcgtgttccagacaaacgagtgttcggatactgatctgaaattcttgacagccgctgcattctcggcctacccacgagaccgactgctaggcctagccggctccccactagcggtctcgtccgttcctgatcctgagaggcttcgcaagtaccacgatattcttaccgcaggaccctctccttcggcggcctcgaccgggcaatcaatcaagggggagtctatcaaccacagccgccacagcaacatgcgaaaaggttggggatctcgtcacatgggaatgtccgccgtcaccccgaccggcacgttcggaagtttcgaatctttgatcaggcccgcatcggaaatgcaggtcatgacgccggaggaagacgacgaagcacccatcaacatcaccttcgcctcgctcaatctttatggaatgggtccgggcgccaagaaggagccgatcgctttgagtcccgaagctagggagtttgttcccactaatacccctgccagcacgtcaaacatggcggctgaagcggtcatgggacgaccggccgtatcctcgaacgccatgatcgagaagctcgcggcggcaagaccggcagtcgaatcggcaactcctgcgatcaatgtcaagatcgatgcacatgactctgaaggaggtgatcacgaggatatgccgttgtcgtctgttgagtcggtggccgtaaaaaacggccaccacatccccagccggcccacattgtgcgccttgccaccgaacctgcccagatgggcgcacaagagcgacgtgcccgtagcgaaacgaccgcagatgataaggaattccggcagctcgtccatgatgacatctgtcacgacgagtcccgttgcggagagtggcatcgccgccaacaagggtctatcatccccctggagacgccagccgacgatggcgacctctgtactcaaggccgacaacatcaatgccgccccatctcggccacagccgattcaaacggaaaatctctcgcccgacgccaagtcgcgcccttcctcggcggtgcgtgtggggagtgccctgccgcatcaagcgcaaggttctgcccgcagctggggaatcccagcggggtccatggcgagcccagctagggtgcccaagctggtcaccccgaccggtctgctgggagcggttccaatgcaaggtgctggttacaaatagatgcgtgttagcccgttccgaaacgattgtaaaggctgctcctgtatcgccgatctggcatgtaacatgatgcatgttgtacaagcatacgggagtgccgtattccaggttcgggaacggcggttgtcatacatctttcaagggaggttcgcaaactcgctcgtaacgctttccaatttgtccagcaattcctgcttccggttgtcagtgatccagcttccttcgataccgttgcgacaaatcaacgcccacgtgttccgatcgaaattaaagctagcctgcacctggacataattctccagcaagtaaccgccgaaataagctgggtcgtccgaattcaacgagaactgtgtcattgggacatattcagcccgacgcggcgatgatctaccagaagatccgagtcaactgaccttgactcccgagtccatcaactttcgcaatgggacctcgctgagatgtttgaccaccctgagggcgacattgctcaacggacacaccgtgagcatcgtctttccctctctgagcatcgccaggacatcgtcatcttccacactccgtaccccgtggtcgatcctggtgacgcccagatcctcaatggccgaccgtacatattcggcgggtccttcttcacccgcgtgagctgtgagatatttgattccaacttccttggcacgttggtagacaggcaggaactttctggggtgttgatctttctctgtactgcacataccgagcccgtggatttctcctgattcatagaatggccgtgccagatcgacgtggtcaatacaggactgcactgattcatgtcggaggatgcacatgatgaccttgaaggtgataccgaattcttgttcccctctcttcaaaccatcattcaagccctggacgacgatttccgctgcgatcccccgcgcggtgtgcgtttgcagatcaaagctgatctcggtatgcgcgattccgtctgcgctcgcctgttgcatgtaggcataagagaggtcggcgaagtcttctcgcttgataaggactcgactcgcgcgatcataatatgccagaaagtcatcgagcgatgtgaacgccttgtatcgtgcctctagggcagcgacattggcataggcgatatccgagatggctgatggcagagcgatagcattacggactgacagggagaacagtagactgggtgacaacgagccctcgatgtgaaggtgatgctcgcatttcggtaaagcagcgaggaacgggcggtaatcagggccagcgtcggacattgttcgattcaggtggatccgtgtttcgagtcgcgaaacgcagatgtgtcgattggtagattgtcgggtcgaagggcgatgtcggttcttcaaagctgtgtcgaacgattccggaatacaagctagccagactgatgttgacctatctgtcatatacttactcagggggaacctttgacggacagggcagacaactccaagcctatcctatccttccctacaagtatgcaatcccgatgtcaacggaaatgcacaaagtaaacaacaatcggatcacgtgtcagcctcatctcgggtatactgtgataagggctacagaagcacaaccatatcgggagtgaaacaacaaggctcgaaaccaggacattacatgatgcagcaatcattatcgctggagacgggcttggagacgaaacccatctgctcaaaggtgtctgcccccttatacgcgccagcttggacacgacctggaggtctcatctcgttctgtcgtccgaccttggccgggtcatgtagtggctgcgcatccgattgaagcgcagcgggacgatccgagaccggcgtggcaccaggatcatggagcgcatatgactggcgacgctgtttctgggaatcgtccgtcaggctcgtgcttcggctcgaagagcgaggaggcttctccgtatcagcaaagctgccagaagccattcggcccggttgaggcgtcagcatttgcgaatggctgggagtgttgagacctatcgaatcgccatgaccgaaggccgagctggcgttcgacgaaggcggatgggaatattgctgttggtggccgatcgaccctgcctgagccggtaacgtcgtgacggcagagctggaggagtgccgagcgtgacgtccattctgcccctgcgcttcgagcgggcggacagtggggacaggcgggatcggattagcgtgtccgccgtgctgcccagtggggtaagccccttgtcgagctggtacggttgccctccaatcgttgatagcctgaggggctagtatgggcaaatgcgaaggtccttgttgggtgagagcgggtatgtaaccattgagcacggctgcaggcatcccatccgtgtgagaagcccctgccgtctgaacacccgaagctctgcttgcttcttcctgcatccggcgtttcaaagcgtcttgattcgtctcgggtcgaccgccctgaccatggcgcaatcggtccgatcgttcctttgcggtagtatgtttccgcacgagcgtcctgttcagctcaaacatatgatcgtctccagacaaggcagatgggattggcgtttccagggcgcgaagtcgaccgatagcttcctggttgcctcgtttggcggcctgcagaggaacgagggcgaatttcagtcaattgtctggtgcaaggtatacgacagggacattcactttgtggtagcacgttttcgcctgctcaatatcaactggtcctccgattccaactctgagtgtatcgtcatgctagtcagttgagcggctttggcgatgccgatacccggtatgcacttactcgttgtagtatcctagagcgaacaagccggtgggtaacctcgcctgggccgccttgtccgcaaaggtcctggatagcgtctcctctttctcgaaacatccctcggcacctaccaagaaccatttgctcaacgccatgtccgcctcgatctcgccttcctggctggcgagagcatgatattgtacgctcaacaacgggtcgtacggacaggagagctgggcgtgctcgtgcatgtaaccagccttataaagagcggcaccgaaacagagataggcagccttgaggatgtaagatttggcttccttgtgctgagcttcgagttgaggtgaagcgggggagagcgccgggaggagcagacccgaggggaacgggacatcgtggttctcgccggcaaggagcattcctaggaagaatgcagcttgtggacaatcgacggtagccatatcagcagagcgacggagatagtcgaggccgagcgacgcttgaatcggagtcttcagctgccctcccagatgggcaacagccaggcgctacgaattgggtcggtcagcgaccagagctattcatcattggccgttcgggcactcggctcacgtagatacattcgccatctcccttggccgctcccttctcgtaacaattcttcgccctctctaattctccacacacctcgtaatccctacctagcctgaaccagcctctgacctcgcctcctcttgctgcccgctcaaagtccttgaaagcctgacgggcgtccttggtcatcctcagctcgagctcttccgggacgtttcccgtactgagcagatgcgcccgaatatagtacgccgccgctgccaaggctggaacggggcagtctagcatgctgatgatgaccgtgaccgcagacgagatgagcggatacatggcgacgatttgagggggcgtgggttgcgggacagccgagttgttgcccgtccggttcgtcctccagagcttgtccaggagcctgacgacgtcttgtccccaatgcaacttgtcgcgatccgtaaaatagtcgatctgtcccatggcggccatcaacgatgtcgccgttggcaacgtcatggctatcccgggattcagttccgggtcggtctctggaacgaattttcgctcaatgacaggtggtgaacgaggtttgagctggtcgtacccggaagaccgtctttcgtccaccatgatgtagcccatatccggtccgtccatgctgatcgtcgcgactccctgatagagcgagtgtatcgggtcggacgagctcgatgctcggaagtgtgtggactgaccataggtgtgttgtggctggtatgtgtgggagggaaacggaggatatggtcctgcttgaggttgtggtaaaagatccggatagagtggcgggatcgaggattgccgatggttaccgtcgtcgcacatgatgacgagaggaatgttcctttcagcctcggcgtgatcgatatcgtctatggcaaacgtttgtcgcttggaatggtgtgtttcgtagatctgttttgctagtgactatcagacctggtcagacagtatatctgggtgagctacattccgattgaccagtacagtctcacatcagagtagtacgagctgatcctgttgtaccgggtctgatgaagatgaatgtactttattgtcctcggccatctcttgatgaatcccgcgaatgatcggaatcaaattagcgcgcagggaacagaatttacatccgaccgatcggccggctaagccctataacgcctctttcctgcgcggtcgacgagagtgatgtgcgagtgagcaagtgtgcagacgtgtacaacctatttcatttcgactcgatgatcacacggcttggcaggataacaagacaaaacacacaatgcgaccatgctctctcttttctctctcgacactctcccacctaggtgtacttcttcttgaggtccttccagatggtctcgagctggatgttagacgttccctcgtaaatcgctccgatcctgaaggtatacatcgagcgaggtcaatacgctgccaccgtcgagggtcaagaagagtcattccgagcggactcacatcgaatccctccagaacttttggacgggcaagtcacgggtgaaaccgacacctccacaccactcgatcgccagtccagaagccttctgagcgacctttgacgcgtggtacttggccatggccgccgggatcttgaactctttgccctcctcctacacgacgcagacgtcgaacatggtcagccgaaatgtttttggatggcatgcgaaatgtgagacgtccaacgtaccttgagcctggcagcgttgtaagtcaacaacctcgccgtctcgatctcggtagcaacttcggcgaactggaatcccattctacgacaacagtgaaacccatcggcaatacgatcagtccatctgttctcatcgcgactatgcgaactcggacgacccgtgagacgcacccttggttgtctccgatcgccttgccaaactgtttcctttggaacgcatacgtgaccgcatagtcgaaagcgccctgggcgagccccaacatttgagcggcgatcccgatcctcccctcgttcaggatctcgatggcgatcttgtaacccttgccgacctcgccgacgacgttcttggcgggcaccttgacgtcgtcgaaactgagcagacaggtcgaagaagcgcggatcccgagctgtgttcgacagggcggggcgggcggggcatcagtcgatcgtcttcgcgggaacggcggtggggaaaaggtcgtcgtacctttttctcctttttagcgatctgcacaccccactccttttcgaccatgaaacacgtgatccccttgtatcccttgctcgggtcgacgttggcaaacaccaaaaagtactctgcctcgcccgagttggtgatccacatcttgcttccgttcatgatatagtgctcgccgtcgggttcgagcttggccgtcgtctggagggcgaacgcgtcggatcccgagttgggctctgacaggcagaacgaaccgagctgagcgaggtcgtgcgcaagagcggggttcagcgtcctgtctctgaatcatatggaaggttcactcacgacattggtagccagaccggggaggtacttgtccttgacatagtcgttcccgaacaacctcaaggtcgagttgaccaacgtgttgtgaacgtcacagcagaccgagacggagggatcgaccttgctcagctctgatcacaggccacaggaagacgccggatcgtcaatttcgatcccacaaacaacgatcgcgtatgggggatctgggggcggacgaggggacgaaccttcgacggcgaggatggcggccatgaaactcatctcggatcctccatgttcggccgaagtctcgatccccatcaaaccctgatcgaacagccccttgatgatttcctgtaccaacattgcgaacagttcgattgagcccgagcacgcgtggcgcataacagacctcgcagagcgtgtaaagggaggatactgacaggatccatgacctcggattcgtccatctgggtgaccttgggtccgataacctcctgagcgaatttcctcactgaacaacgcagatcatatcacatcgcatcgtatcggacagcaatcgtctcttgatcagcgcgagcgaaaaagacgggctgtgggacggcatgacccatgtcggtcctggacttacccgtctcacggagcatctcctcttcctcggtaaagttgtagatcgaaggaggcgtgtcgatctcgggtcgagtgttgggatcctcgacctcgctcttcctcacagtggaggcgtggatggacctactgctcgtcgtcgagccggttgtggggttggcgaggcgtctggtgggtacggcatcggatttcgaagcagtggtggggcgggatgggagcgaggcgatggatcgtgcgaggacgaggcgggtcggggtggggatgaccgtaggtagactggatcggagggtacgggagagcatcgtgaggtcgtttgatagaggtggtaggtaggtaggttaccgagtgatcctgcttgtcgaggtcgaaaggtgaatttgcgagatatttctaaaggtctatcaggatcgcttcacaagtatcagacgtatctatgcaagactttatgagcccgaccttgacgacctgaagcttgtatacaagtagtagttagcagcgtcgtagagcgtcgtgaacgacgaccatgcatggatgcgatgcacctttcggtcgtcacggtcctcgatgcttccttctcccctttgcctcccccacccggggctcaccacctgaccaagtaaccggggatggcacgcggggggacaattaaccggatcgccacggccgaacgacaaggggggccggccgtcacaccgcatgctccccccgatcgaccgaaacaccgggggtcatcacgtgatatcaccctgatgggagagtctgcaagttcgaggttcgtgtccgcggtgcaggttgtcattgatgagttcgatatccacccagtctgctccacaagcctgcgtttaaacacagggccgaaggccgagaggtggcgtttcgcgaggaaccggtgggggattggacgcaatcagatagcgaggccccgaaaaggagcaagacgatgtagcacagtgactacaggctgctctgtagccctctgtaaggggaagggcgagagcgagggtgtatgcattcagcctatcccagggacgacgacgatgacgacgacgactcttcctgatatcacgttcgaactgggtcaatatgggttcgctctcgactcctatcatctcgcattgatgcaggtaggcacaataactcgagcccgcaaggcatgcaaggcaaattaggcaaatgaacagttttaaactttgcactccttgtccctatctaccggtctctcgcttttgctcacgcatctaccacgaccgcggatcgacccggcgactcgcgactaggacctttgcaaaactcaaagtctgttttcccttatcccgactgcaagattcgtttagaggttgagagggcggctttgaactttgaaggtgatggatggttgatatgactgttcttccgtagccgagtggagtgtgggatgccgcgctggggctttttctggaatttagcatccgaagcgatgtttcccccctcctcgtctacccttcttctggcctagacggttgttaaacgctaatcaatgccgtaatcatatccacatcttcccctctctgtgctgcctgtgctgctgtgccccctccggggatcggtgggggtgggtcctttgatgatctgatgatgtgatgagcgaaaacggtcattcagaataggtggagccgatgtcatggcggttctaatctcagtctatcgatcctggacactatgagcaaagcaattcatcgtcgtacgttcgtcgtgcgatttgaacatcaaatgctaccgaaggacagtcggtctatttgagatcgtctgtcgcgtcatcaatttgatcaaaggttgggggatctgctgtttgattctttctgttccatgaggattccccgagaaagaaactcatgcgactcgatcaaaagtaaacaaaccatctcgctcgacttgcactttcctttcaaaggcatctccatccagctcactcgtcagttgccgcaagttcctatcctttcgtgacagcatatatagccgtagcatttgctcaccttcagtaagaactttccatcgaaccagcgggagataaggatagtcagggtctccgtacagcaatctcaatctctaggatcactgccttcaagtggtagcttgtgtcctgagggaccaggatacgaaaccgcaagagcgacgtagacatagcaaaagacgactcgagactagacgttataatactcatcatactctttagtcggtccttcctttgatcgttcgtcaagtcatcccggtcgaccgcatactacccagcttccgaccaagtcgaccatagctcgcatagatcgacttggaactccccagctagccaacaacccggacgaatgcaattggcaagatgtcggccgcacctccgacgttacccgcctcaactgttcccacccggaaaaagggtattgccctgcacccatgggtgagctttgtccatcacccactttctctcccgagcttaccgtccgctcctctcgcgctcctcaatgaaatccatagcaacccggtccagggcattcccagatcctgacttatcttcaggcggggatgcattcgagggcgttgaagttgcatcccctgttggacttgacgatgtgggatcccaagtgagtgatcaacgttcgatttcgagcgatagatggatgacacgagaccaggagccgatcgttgacggtgggttcgggtctgtttggttgtaaagaccttggccgaagtatctggccgtgagtcgaatatttcagctagtttcggtttcattccgtctgatggacctctcttcttctcgtcctctttttccagtggaatgctatcgaacatccggtaaatcatggcttctccccaaaccttctcttcagccgctcagacctgacgtgtatctccaccacctttttaccacggaaaacaggcctatgcagtgatctggatcgacgaagaagctcaagagacggaattagtgggagaaagggatcacgcggccactcagcctcgtaagcaacctcgtccatcattcggtggaccgttcccccacatcggagcgttcctacagacgagcttacccaggcgatggggatcgtggttccgatacgctataggcgtggaggaactgtattgctgtcacgcagagacaggttgggtcgtccgagtacggtaagtccagcaaggctcttgttggggtctcaccaactcaaaacagaacgcgccgagcttacggtacatgtatcttcgactggatggaaaatatggtaataggaatcgaggtggtgtaacgtgagtcgcgcgccatcgatcaagagctcgacagtaacgctgataatggaaacacgatatcatcggtgatcgacagggtgaacgacgtcctacatgcaatgtgagttcgatcgaccatcctgcactcgtcggtgtggggaaatacgggctgagatcgtgatgtctcgatcatctcgatagtttcgaatttttcgcgtcagtctgccgggatcctacaacgacccgattctaataaactcaacccgtgcagatcaccactctacgtagatgagatgatggaggtcagtccatttcgacgacctatccgtgacccgacctcgccatctcgtcaggctgattattattgaatactgggtacggacagatgcacccacgggctgttcggataatggaacatcggtactttgaagcgagggccatgttcggggggatgaacccggggatgggcatttttgatgggtatagaaaaggtcagccaaccagactccaatctgatgatgtcgatcgaccgcgtattgaccggtgtatacgaatcgatagccgacgctctgctcgggaggacgtttttcaatggaatcaagtgggatccacagaccctggcggaccgatgtgagtatgctctagtttcgaaaatacaatcttgagcgactaaaggttttacgggctgactgtgaggaattttgaaatccagtcaacatgacatcgacaaacgctttcatcctagattttggcgtgtgttgagcgattctcggttgtaattctgaaaatgtcacgaaaaggttattttcatcaaggttcaaaaaatgacaaggtcgaaagatcggatcgcaaacgagttggtcttgttgtgtgtccgaagattcgggaaggatgatccacagtgattgatcacgagtcaaccgaggacaataagattctggccattaatgcgagtgtcgttgtcgttgtcgtggacgtcgttgtttcaggatcgtcgatagtggagctcgggctgatcaaaaaagagaacgacgagcgacgacgatgacgatgactgcgagcggaaacaaaggttcaatcaaggtggatcgggaaaagagtgagacgatatcgagggtcctttgacaaatctgagaagctcgatggcgataagtatgtagagagttgatgatcgaagagagtattcttactactctctttcttttctcgtttgatgtgctaaaatcattcctatataccgaggcattcattagatttatcgcgatgaacgtcaagacggagctctcatcaccgaaacaacttagtccttcgaaaaaacggaaggcggatgacctcgagtcgaagaacggagcgaagtatcagaaaagagtacgtcgcttctcgcttctcctccccggccgtcggttaccgactcgatttcaggcttggaccgatgaggaggaagacatattcctcgaactcgttcgcaaggccgtaacagacaacatgtgggcgctggccaaggccgatggaaggctagtacatcggggtagtgatgggatcaaggctcatgtcaaggcgttggtgaatttctggccttcttcacttctcgtcttcgttcgctccaacttattgatggcgcacgggcatttcacttcgaaatatccttaggtccggaagctgacgaagccatgacaccgaaaccgggatgcggggataacgtcggggtttgtccatcattttccctctctccttctccctcccttctagatccccacagcccccgtaacgtaatgactcatcaccagatctcattttgtcacacgttaagcgcatgcccattcatctcaattcacgaaatggcacgcccattgtgttgatgcccaggactcgaacccaggccggatcgtcgacgacaacacagcaccatcacaacatcatctcgacctacttcaacctacttctacttcttcctctttcttttcttcttcttcttcttcttcttcttcttcttcttcttcttcttcttcttcttcactcgtctcgacaacgacttccccttccacaccatcgcttaacaaacagccgctatcacaaactccaatcgttatacaaacaccaccaccgctaccaccaccaccgacaaccacaacaagaaaaaaacaccatcaactttccactttccactttccactttcaactttcaacttccaactttcgacatgattttagatatattactgctccttttctggatcactttcttcgtgtctgctctggctatcagcctttttgttaccatcgtctccgccggtctcttgaaactcgtcgtcaccttcatcatggcccagatcgtaagttgaccgtttcgcttgtttgttctttacttattttataatgactggccgtcggtccagttcttcgaggatgctgtgaccggacctgagccagtccagcgtcagcataagtctctgtcttcgtctcagcatcagcatcaggctcagtactggtctcgcccccatccggcccagatgccagtccagtctcagtctcagcatcagtctcagtactggtctcgcccccatccggcccagatgccagtccagtctcagtctcagcatcagtctcagtctcagagtcaggctcagcatcggactcgccctcagccagcccagaagccagtttactatcgacctgcggctcccgttgtttcgcttagctatcgagtcgctgccgcggtctactttcaacgcatggctgccgtcgtttcggacctctctgtcaaggatatgtaccgtaagtccacttatgtgtcccttcgatacgtagacagacgctcacaccaccaacgcttcgaaacaggcgagcacttcgaaacagacgacgagcacttcgaaatcgtcaacagtcaccgtcgcgaactccagcaacaacaagtccctcgatacgacgacgacgttcagcagcaacaacaagttcctgaatatgacgatgtcgttcagccgcaagaacaaactcctcgtaagcctctcccgtttcattctcggtatccgctctctatcatgctcactcgcgcgatgtcaacaggcgtcagcccgtttcagctgttctgggaatctgcccaacgccaccaagaaggttcaaaggggttccagaagttctttgaagccgctcaagcctatcaacaataacaacaacaacaacaacaacaacaacaacaacaagaacaatatggtactcgtaaggcagcacctttacccccgagttcccatttctttggtagctgacaccgttcccacagccgccccccgatacgagcccgctggttacgagcccgccggatacgagcccgctggtcacgagcccgccggatacgagcccgctggatacgaagccgccgatcaccagcccgctgcgtaccaaacaacgacgccccaatggacccgtaagcaatttgacgagtcaggattatccttaatcagtagctcatctcatcgacgcgttttgaccctcagcaccacctgcctaccactcaggcgtcggtgctctcgcccggaacaccgaagaaggttccattcggccactcctcctcggaccgggaccgtccaccccttcgccacctactgggggcagaaggttgctccctctctctctccttgtcccgcctcgtctcgcttgcgctctccctgtcgcgttcccggaccggctcgtcctcaccaccgtgcaccagcgcgcaagctggagacatcgtgttgagaggtctcaacggggtgatcgccgtgagaggaaagtaagggccgtgttcatggggcctttgttgcgaaggaagtggttggatgcacgtgggtaggtaggtcactatgacgacccatttcgtctccgacgatcttggaggatggcatcgtcacagacgattcatccggtcttggtgatctgcagcgtgcttcttctctcttcgtccgtggcaaaccctggtgatcgtcggtctcatcttgcttctccggtgtcctcggcttgactatataattctcggtctctgtttgagggttttagtactctaattcccgttctctgttcgtggttgttagtagtctagttcccgttctcgctcgtgatatacccataaacacatcatcccatttctcagattgttcggtcgtctctttcccagaatacgttcgagtcgaagtcataccatgatcataatcctttgtcacagtcaagttggcagtactacaggccattgatgggcaaagggttgatacgattaggcaccccgatcagcttgcatagctcctccgtctgacgatttgtgaaccattgacctgattccgtagccgcggaaatcaatcagcttctcgtcagggagtcaattcgtatggagtgcgtacctggaaaggcaggtccgcagaattcgggcggagctgtcggctggaatatctgtaccgcttcgacgtcgagcgatccgaaggggtttgctggcgctaccaccgagccttgcggacttcccctgtcctgctgttctcctatcatttccgtgtcctcttgagcatcggcgggtaccggtatggactgagtcgattcgatcggtggtatgtctgaggcggttgacatgtctctgctgacaacgttctcatcgatccatctccttgcgtcgtcgattaatttctttccttcttcggcagtgggtagtggtcgttgatttggtgtaagactcaaccagggatggaaggctcgagtgatggcgagccattccgggtcgaactggagtcggggcggagagtcggactgtggggtaggtagttcgaggaactggtttgaaaaaggtagcttatgagctcaacgttcaaatgtcgcttcccgaatcggacgcacctggatgaactgcttgtgtgggccgcacttgtccagtgcgaggaacttcgtctcgatctgttccgtcgccgtactttcttccggccggatctgatccttgacttccgtcagagcctcggtgatcccctcctcgtccgccttgatgggcacttccaagtctttgaccgttgggtcttgctcgattcgatccacgctttcaagcggtgtcgcctcgacctcttgctcgggtttgaccggcttcgcttcttcgtcatcgtcgtccgaatcttccatatcatccatgacgatctcgtccggattctcagcctttttcggttcccccgtgggtccgtcgtcgtcgctgtccatgtcgtccatgacgatttcgtcagggttcgtagctcgagcctgagtcggtagactttggttcggtcgtgatggcccacccgactgtcgttcgtctagcatggtccgctcgagctgttgtagcttgtccaatggaatgacggcggagaacttgacgtgaagatgtgcagagaaccagtatgatgggtgaagcgtctgcaagagctgtagtagaggaggcgaacctagcgtattcgtccgcacctgcgagacgagcatcgaagcatcgtcagtcggcatgaagcgcaaggcgaggaatcgggaagcagacgacccacttcctcggtgaagaacgtctttttcttcaacaaccccttttcatccccgaaccgcgtgattccgaccggccaatcgtggctgaggaagatgtcgaccttttcctcgccctcttgcgatttcggccgaggagtgagctgtgataatcggtgaatgtcgtatttcctcgtatggtaggccgaacggacggtcgatcggtcataagggaccgtctcgaagtggcctgtcgaaatccgcaccgagggagggaacggtcacctttccgtcagttccgaccaaacgaaaggcaggtgacgaggcagaagaaaccgacctttgtgaaaatcgtgcgacttgtagatacccgacgctcccgagatccggatcccattgacgatgacgctccccgcatgccccaagtagtagatgttcggtgccaaccagcctccgtggtacctacgggcaagacagtgccagtccgacatcagcttctcagggtgattcgggtaacggaacgaaaaccgatgataggctcacaattcccacatgtacgacatgcattcgtggttccccccgatgacgatcgtcaagcaaggagcgacccgtttgccagagtagtattcgtggaaggaacccaaagaccggtatttcgggctgatggcgatcgaatcatagtcgcaggtgttacgtagagcctgtaaagggggacgtgacatagggcagaggacgagagcgaggggttcgacggtagggtaggatcgaggttcagtataggtcatgggaaaggtgcacaaagaagaaggtaaggacggactgacctggaaatctccgcagaggagtaacaagtccaccttggtacccttttcctcttcagccttttggacggtcgcatagatgtcgttcaagcatccgtgggagcagccttctacggcgatcttgacagttgcagcgagggtatcaacgatgagcatttcaatcaagtttgcgggtgtaggaaaactgaggatctcacatgcattctacgagaaggcaattctaaggatgcgggatgcttaatgactttatgacggaaagattcgttaggaacatgtcagtacgagaagtggaaaggacaccctcaacgtccaagacttgcctggttaccacttgggactcgtttgatgctcctcgttgttgctgttgctcgtctactgcttatcaagatgatgacggcctctgtgtgatagagaccgagttatccttaatcacgttgtcgttgtagagaagtaaagagagtagtcgaatatgtgtatggtgaactttgtcgagtttagcttttggatgatcaaagtcgaagaattcgtcaccagcagctcgctcgcggaatcagagcgcgttgagcgatttggaaagactcgttttgatgattcgatttgaccctctttcgatagacttcgaacctatgaaattacgacctggaggtagcccagatttttctgaatcgatattgacgcctttggtctcggtccggtaaaggatgatcgaaatatcgaggtttccctatcatccgctcgatcgttttgctcgcgtctgtgatttccgtcaaggtgggtgacgggtcaggttgagctttgaagcgttttggaaaagtgaatcgacgtcaaaatcagactttttcaaccaattgagcaggggtttgttacggatgagtagacgaactaggataaagttgcttcgtgctactgaaaaaaaatcccagccggacctcgcccccagagagattattgtcgagatatctcgtttgacctcgaaagcttaagttacactattaagttacactaagttgcgcggccctcgtgatacacttgacaccctcaacctggtgcatcagctgaaagttaccataccctcgcaactcgagacctcgacaactctgagagccaattagacctcgtagtaccgagaagcattgatcatagactcggcactgagcctagaggagccgaggaaggatcctcattgagtttggcacaccacactaattcaggaacctcgaagggtgagtaccggttcgcaggggtcaccctttctttggcctcatcggcacacgacacatgcttagcgaaacgggaatatatttaataggcttgttgctatcgtctcacagggtgcacgcatcttgaaattagaaactcgggcgaacctctagctcgccatgctcaagacagttacaggtcggatcatcccccgaaaacgagacgcaacccgactcaactccgcccccctcccacgcaagttcgctcaacggtcatatcctcccacccgcacgttcacgagtacttcacaaaacgtagctcaaccggagacgctggacaagcatgatgaggatgtacagcggatcttgagagaatatggggtcgacccggatgaagtaggggatgccaagcaggaggaaaagaagaagaggaagagaggggagaagaaagttgaggatttcgaggcatggaaagaatgggatgggatgctagataggaaggacgaggtgcggtcaggggtcctcgcacgaaagggaaacgatgacgagggtgagacaaggcgagatgggttgcccgcaaaagcaggctcgtccggctcgaccagtacgaccagctcggtactagcatcgacgacctcggggacaccgaaccctacgccactcttcatcagacccttgccctcgatatcgacgccgaacgggtctgcttccacttcgacggctcacccaaccgatcgctttcaaagccgactgaacgaccacataaagactctacgtactgaagctgacgccttgaggaagaccttgtccgtacgcacagaggtcttgcggtcgagagcgtccgaacgggccaaggtgttggagcagaacgcgaggttgcaattcggcttgctcggaggtcgggtgaacgagctgacggggtacaacgaggtagagaggttgaagcgcgaggtcacggaacgaggtgagctcggagagcgatgacgatccaggcctaacatctcgccttgaccccactgacccgaccgtcgatagaggacgatatttcgaagttgaggacgatagctcgggaagccaagctggcgtacgacgaggcggtcagcacacggacggaatctcaacgagaggtcaactcgctgctcgaacggaaacacgcctggaccgattccgacgtgatcaagtttacctcgctcgtccgggcggatcatacctcgaatacgagcgtacaaacgaccaagacggcactggtccaagcggaagccgaggtggaaaaggcgtttgacgcgttgatgaaatcgatcctacatcgataccacgaggaacaggtctggagcgacaagatccggagcgtgagcacgtacgggagtttgatcgtcctcgtcgtcaacctggtcgtctttctcggcgcgatcgccgtcgtcgaaccatggaaacggaagaggctcgtcaaggggctcgaggatcgggtcaaggggatgatggagacggttgagggcaaggtcgagcacgagatgctggccgtcaaggagatgctgcatggggtgcatgcagccttggccgcgatctcgacaggcgacgagagtcgattaggcgaggcattgagcatgaccgcggcgagttcattcgagccgatcgaggtgtcgacgaaagtaccgctcgccatcagtcaggccacgacgtccccgggaacgagcagtctcgtaccaagatcgatcgtctactctctgtcggagcaagtcgctaagatctcgccccgatcgagcgattacatgttgcaggtcgatccccgtagtatcgatgcagcggtcgtagggacggcagggatcgtactaggcgcggcttgtacgggtctgatagcatggttgcgatgaaatgcatatacaacggggcattcggtacaaagggtaggtgctttcgcaatgatcatttcccggtaccagttcggagagtagctactcctcgcattcctaccctgccctcctgttcggcccagatctcaagctgcccggcgtgatcgccctgacccatttcaatcggaagattcctcccgttgaacgtgatgtcctttccggcgtacatcggactgatcgctcgatagtagaactcttgcacttctctcccagtcctctcagcccactcggaggcacactcgagcatggtcaaagcggtcagcgggccgtgcacgacgatcccgcctgggtggccctcgacgtcgcgcgtccagatggggtcgtagtgaatcttgtggccattgaacgtcagcgccgagaagcggaacagatgagctgcattaggggcgtaggtaaaggtatattccggggtagccaatgtcgaaggggccgcgcctggagttgaagctgggaccgcaggttcagacgccggtggaacgttcgaggaagccttgacggctcgacgaaagacgtggaccctctgctccttgaccaggacttcctcttcctcccctagccgagcgtacgtcttttcttgatgtacgaacacgaggtcttttttcggcttgtattccaccttagcgatccgggtactttcgacggaagagtcacctatgcatagcggtctcgctgttgatggaaagctgaaggagcctgatgcccacatacgacgagtgtaaggagacggagcgttgaaagactagaatgcgtaagtacacaggtcagtatagatatgaggaaacaaccgaggaagccattttgacttgccctgctggttccatcctcgccgaggtcttgcacgaaccccttgtcccagtgataacacagcgtccaccccttgcccaacgcatctcctttttccggcagccgtgcttgttccgctcgtgtgggaagcgtcacatgtatcccctgtgctctggaaaggtcgatcagatcattgttcgttcttgttggggctgtagtgatgtcggagatccatgcctggatggaggccggtagactcgaaaggtctcgcactgaagagtacgttcgtccaggtacagcaaatcgagtaaagctacgtcttgtcagggacatcatttcgacgtgagtctatacacatctctatgcgatctctgaatcgctgaacgtccaaggcatccgaggtgtattagatgatccgatgcatgttatatcctcaaagtcggcgctaaccgagatcgtgactttggcttcacctcgcccgagacgatgtgaatcttttgatattttgctcaagtcctcggctcacagctttctactctatctatatattcatctgcatattgcactctataggcgatagattcgcaagtctgacgagcttcatcatccccaacgccgaaatttctgctcaacaacctgtaaatagctgtcacgtcggtttcgtcatcacagcagcatcagcctcacaaacatatcgtagctgcaacgagggcctatcccgatgcatctcgacaaccttcatgcccttctgggtaatgatccttcctcttcatgtatcaagacgttcctgagcgaattgtccgggagctcgtcaaccctgacaccggaagtcaaggcttacccggatgtcgtctaccacaactattacgacttgggcatctccctatgttacgtcccgaccaagggcaacaagatccctgtggacgcacaaccgggtgatctgaaattggacacgatcgatatctaccacaaccccgctagcgagacggcttccatcagaccaggaagagtcccgaaaccgacgttcaagacgttttcggcattaccgatcgagttcccccacgtacccgtcgctagctcttcttccactggagagtcatcgacaactgaaccggcgacatcacagtccaacctcctactggacggttcgagcgtaggcaaagacctcgtcaaggccctcggagaaccgtcgaaaaagggaggtgggcagttctggttggacgtctacctcgaatggcccgcgctgggtatacagatcgatctcaaggagcaggggaaagagatcactgaagagcagaagaagaaggggatgggaggggtatgggacaaggcggcagaatgggggtggagttgtctcaaggtgtttgagaaggctgggtgaggggtcgaagtggtctgacgtggcggtgggggtgagcgatggtagtaaataaggggcgtcgtcgctcgtgtagatctatagtttaatgatgataataatattccgatttatgctggtcgttatgagagatcgtttcgctacaaagtgccaggcaggaccagtcaacaacttcaagccataggcaagggcaagctcgttcagacggctcactttcacgtaattcgtccggttttgttcgcatgatgttgcccgccccgagatccggttgataccaagcagatctcgcagatacttctagagagcaccttcacatgacatccatccagaggcgtccatcctctttagccttgtcctcggcttcgatcttgatgacgtccttgccgctgatcatgatcatcccgacctctctccctccgaaataacccctcgagaccggagcacccctcgtcgattcctcgtccggtttgagaaactcttccgcctgtgtgaggatgatattttgttgcttgtccacgcagatgaattgaccgataaaggtacgctcgtcacggatctcgatgcgtagggtggtattgaggagtgagcgcaggaaggccgtcgaggagggtgtgcccgtaggcgagttcatgatcggccgacaagtaaacctatacgccccggatgtcgtttcaaggctcgttctagactttgaccccgggaatgtacgaactgttgattcgaacgaggtagggatgtgacagtaagtcaacaaattcggacgatccaacaaggaatagctaggttgaaggtcattttacttgcttgctttgactctttggcatatgagacggaagcaaattcattggaatccatcgtccagctcgattgatcaaagttcgtctctgagtatcgtaggctatgcgagtttcctcaaggcaaacgatgtacctcagtgcatacagctctgagtgacgtactcatatggcaacatggtagtagcctgtggctgtaaaatgtatgtccaaacaccaataccaaaagctaatatagctgacggacacctttttgttggcgatcgataacagccatatcgtaaacaaacctcttgcatcgaaacctttccaacgacgaggcgggcgatctcgagctacggatgtctagtcaggaaagtgactttcacctagacgatggggatgatctcgtcaaggcttttctggaacaggaagcccggaccgaggtcaaacagcctagggagacggggaaacgatcgaggacgaggagttgttcgcccgatgatcgcgtgaatccgtactatatgggtgtcttgaaggttgcatcgatcgacaaggagaacaagatcaagaaaccaagagtagagaagtctccttccatcgagttcctggaggtcaaaagcgtaaagcaggaggatgttaaggacgagaaacctgtcatcaaacccgagtcggtctcgctctcgtcctcgccgatcgtcatcatcgaatcgcccgtttcttggccgccctcgatgaaacccgccagcgaagctatcaaggaggcccatgctacccatcgcaagtatatggcctcttcttcgacatcaacttctacctcgatccacccaaagggagtcgctcagacgcacgtcgaaccaggaaatggacgacccgagcccgagctcgtcgccatccatcaccccttgacgatggaatccagccagacaacgttgatttcccgtctcgaagactttgacgaagagatgaacccgaccaagagaggcaaggctgcgcgcgttggaaagttcaggaaaaaggacgaagacgaggtggtcttgagagatgacaggggaaatttgacagagaaaggcaagagagcgttggataaaaagttgctggggagtttgggagaggaagagaacgcgatcacaaattcggacttgtactcacggtgagtatggactggagctctaaatttcgagtgcaagcgaaccctcgctcactcgagcgagtctttacatgttcggcggtgattgatagcacgcaacatatcatctcggccgcaacggggcatcaaatctcgaaccgcggtggcgccaagtatagcatctctgggaaagattacaactcgtccaggaatcataagttgaagcaacagtttacggcggctgcccagcctgtcgagggggaaggcggggtcgccgggtcgagcgggaaacaagagacgttcgtggttcaaagccggatcttcggtcagtcgtttccgagagtcgtggtcatcgagtggtcccggcaaactgatcggaaatgacgtcgtagctggttgcaccatgtggctgaatgggtatagcggcaagagaattacggacatggagctgaagaagctgattgccgtgcatgggggaaatattaggcgagtccacttaccgaggtcgtccctctttgaaagaacctcgtctgaccaccgcgccactctgcagcatgagcgaaggatccagaatcacgcacgtcttggtgagcgaacggatttcgggaaccaaggctgaaaggttcttgaggggagcgaccaaggcgtacaccaagaatggcaagaaaaaggtcgtcctcgttgactgtgagccaatgtctccggggtctagtcgatccatcgctgattagtctgctcgttgacgttgatgcaggggttctcgattccgtcaaacggggcaagaagctaggcgaatcggcttacaatgtgatcgagaacgaggtgagcactcgagtctagtcccaagatcgatgggagcgcgcataccccgccaggtatagacgctgatcttcctcacaggcccagcccacaatcatctcaaagtttggcttcagctctgcttctccttccagagttcggtcggatgagaaacctgtcaaacctaccgcggagacgatcagcggcaaacccatcgaggttgtcgagctcgattgacgcgatcaaagacgtgattcctgcgatacggaagagactgcgagactcggacgattcatgtggaaacgattctataacttgcctattgttcccgatttcctcgcaggcactacaataggttcttacatgcgtggagtcgcgggcgcagatatcgcctaactgatcacgtacgccacgttgtccctcgcggtcgacaacgataacgggctaagcgagccccacgctcgacgtcgaatcaatgctgcggcaaggccccgggccgcttcagtgcttgcggtatatcccgatagtgtcacaggaacaatctgaaacgattgtcaacgtccggctattcgaagaaagcgagcaagttgcctgccaccaagacgcgtctaaggttattttgagcggcttgttcctattctccgcggcgctaaagatcttggcaaggtccgggaaagccccttcttttcaaagaattggccgatcgactgcgtacctctgcgaggtacagactgattaagtttcccgctgcgacctcaaacttcgggcctatcaatgtgaccatgcggtcctcgagatatgtttgacgctagctcgcgtagtatctgaacccgatagcctccgctgtccgtaatgcatctaccgccgtagcgcacctcatggatcgcgccaaccgagatgtcgcgatggcctgttgagatagcgacatcgtcggacaaatccgtccgagctcgtatccggcaatccgtatcgcaggtcgtgtgatcaagtgttcatggtcccgtctcgggtcccgggttgcgtgtcggccgatatggattcatatcgtggaagaccatcgtatatatgatcgaccttgaactcgtccgccaggtgatgggaccatcgagctctcgacattccatcgagcctcagcgacattattcaccatggccgcgctcacaaacgatgtcaaagaccgtgttcctgtggccatcgaaccctttgtcacacaactagaagatcccgccatcgatgagaagaaggacttgacgaaggaggaggtggttcaggtcgtgagtatggtctttggcgtagggatttacacaagtatgctgaagcgtccttctcagtccccggtcgagttgcaatacctggatgacacccctggcgggcttctttcgcgcgtcacacctcaggacttggaggaggcggaagaatacgccaagaccttgacactggatgaggtcaagactgtgagtgtagtgtggcacgatcatccgcaggatcttggctcaccttcaaccaaaacagatcttgatagacgccctcaagatccatgaacacgatcccggcttcccgctcgcggtcgtgctacaagcgcaaaagttcctctacgatgaagatgcgcaggaggattatgaatcttacgaagcgctcaagcactcaatgttcattgaagctgctctgatcaccaaccacagtccttatgccgaagtcagggccgttgtgtcgaacaaagacgacccgacgctaccggtttccaccatccgagcttggtttatcgggactttctttgtgattgctggcgctgtcatcaatcagctattttcggtccggctaccgtccatcaccgtgggaagcaatgtagcgcaactcctcgcctgtaagtccttcttcgtattcttcaacttagtcaaccaggctgacggttggctgctatagttcccctaggaaagttggcggagcgctgcctaccggactggcgtttcaagcttttcggattggagatgtcgctcaaccctggaccattcaacaagaaagagcacatggtaagagctcgaaatcgtgtttcgagtacaaatgggcattgtgattcattttttgtgattcctttcagcttataaccctcatggccaacgtcggtttctctactccctatacgtaagtcgagggttaccaaaatcaccgacggggcagcctaatcaacccgacaaactatacagtgacaacattatctggagtcaagcgctgccccagtactacaaccagtcctatgccaaacaattcagctaccagatcttggtcggactcggcaccaactttgtgggctacggaatggcgggtctcactcgtcgattcctggtatacccatcctacgcggtgtggccaacgagtttggttacaattgcgcgtgagcccacccgaggtcatgtcgcgcgtttcatctgctgatgacatgctttcgactcatagtaaacgaggcattgcattccgggaccgagaggaccacaacaaggggtccttttaacaagcttttcacagccagccgaatgagagtctttgtgctcttcttcacgggcatgtttatctatttcttcctaccgaactacatgttcgccgcgctttcaaccttcaactggctctcttggatcgctcccaagaatgcggtgtacaacaacatcgtaggcttcaacaacggactaggtctcaatcctctctcgacgtttgactggaacatcgttacattccaaggcgatcctttggtgcttccggcgttcaacatcatcaactcgtgtgttgggatgttcttgaccatgttcatgattcttgctatttattacacgaacacatggaacacgagttacttgccaatcaacagtaatcgaacgttcgatcgatacggagggctttacaacgtctcccgagccatcgatgaaaagggccatttcgccaaaggggaatacatggtaagtagttccggttcttagagtgggacaaaactgcgattctgactatcatcctcactctgccatcgatcgttcaggattattcccaggcccacatggcagccggtaacgtaaccgtctatttctggttctttgctatctactctgcggtcgtctcgtacgcattcttgtaccaccgccacgaaatcgcgatgggcttcaagaatctgttcaagaggaaaaaggctctcggatacaccgacgtccacaacaagttgatgagcgtctaccccgaggtctcggaatgggtttacttgagtgttctattggtcgctgccgccctcgggattgccggcatcgctgcttgggagacgtatactactcctgcggtagtgatctacggaatcatcctctgtgctgtcgctgttgtccctgtcggtatcatcgcagcgatcacgggtctcgaagtggtgagtctgagagtcattccacgcaaggcggatcgagctgactttacgcgtccgactcggcagaccctcaacgttatcgcagaatttatcggaggatcttgggtcgccggtaacgcattggccatgaattacttcaaatccgtgagtcaccaaagagatagtcatacatccgacatggattttggctaaactgtccggaaaaccctttagtttggttacgtgacctgtgcacatgccctcaaattctctgcggacctgaagctggcgcactacgtcaagattcctccccgacacgcgttctgcgcccagatgatagcgacactcgtctcgacctttatttgcaccgccatccttaacttccagattggtctcgatggcgtttgtaccccggacgcgcctttcaggtttacctgccctgggatcaacacattcttcactgctgtaagtaatggctgacctacttacccgacaacacagggaagctgactcatttaccatttgcgactttcaggccgtcttttggggtactctgggtcctcacaagatgttcggacccggcggtcaatacacgatgctcttgatcggtttccctgtcggtttcatcatccccatcatcgtctactttgcgatgaagcggttccctcgacaaacctggctccgacaaatccatcccatccccctcatcgctggaggtatcgcctgggctccttacaacttgtcttacacgctacccgcgcttccctggtctctcctctccatggtctacttgaagaaacgctaccttcccctctggtccaagtacaactataccatctcagccgccctttcgtccgccatcgccctgtcgggagtctttatcttctttgtgctccaattccccgggttcgagttccccgaatggtggggtaacgctgcggactccggatgcgaggccaaggcttgtcgacgattcatcgtggaccccctgttgggctttggaccggctccaggcgagttccccggttaggctctcgatgagatgagggcaagggccgcatgatactagcggtcagaggagagtgttatgatgagaggttgaagagaggagaatgcgagttgtaatacggtacatcatgatagtagtgatttatttcgagtcacagatggccttgtgattgtacgactcttgcgcttagttggactgctcaataatgaagtgcttagtcagcagcctcttcctgcaacgtgacgcgtgagaaagcttgtagatgatcactcgggtcacgtcgagtctcagctcaagtcgtcagaaggtcgactcgccaccgacccgcaatctaatcctactcatatctacatttactcttcgttcatgtcgatagatactatcgaattgaaacctctccctctcgcaaccttgcaaccttcgccagtctttgacgacgacggactcgttcatagctattacgtcctcctagtgcacacttcggactactctgcttccctttgtcgaattcgtattcgaagaagagtagatcacctagtgaatcatccaattcatccccctcagctctttcaacccgtaaagaacgccacgacgaatccttgattggaatctcgaagtcgagagggaaagagattcgatcatatcacggttcgattgagtaggagtagagagtatagccatcggacgagtttgcgcggcgtcaaagtaggacgaacgttctctacaaaaagaaggatcacgagaaggtgaacaacggtcgaccatctcgaacgaagcacgaatagcaacacccactaccacaaagcctcctctagtcatgtccgctcgacctcccaacaaggttcctatgcctcctccagctctcccttcgtacgcaaccgcgcccactccatcggcctcgggtatcgtttctaccccggctcccttcaacgtccccaccccttcctcggcgagcaacaacgctatcaagcagttcaacgcggcttccgctaaagcgctcgtcgatgccgatgggaacctgttgagcgggatcgagggggccgagggggacgtcgtcgagacggcggatgatgttggcaagagcgaggcggtacccagcgtacccgagattacggccgtgcagggtatcgtgccgacgttacagtgagtgttgtgtgtgcaatgctctgccactgcaatcctctcgttgcggcttgtgagcgtttgtggcgaggaacgagaatgcaagaagtggctcaagcatgaacatgagaacatcgttccggcttccaggtgtcctgtcttatctcggaccaccagctccgatcgtagtacgctgatccgcccctgattcccgtcggtcgactccagaaacatcgtcgcgaccgtcaacttgggtatcaggttggatctcaagacgatcgcgatgcatgccaggaatgccgagtacaaccccaaggtacgttggtcgtcgatcgggaacatgtcgtcgatcccttcgtctgaattttggttcgatcgttcggtcataccatgatcctcctttctgtgcttctgcttctcgcccgactcgcagcgattcgccgccgtcatcatgcgtattcgtgatcccaagacgacggcgctcatcttcgcttctggcaagatggtcgtcaccggagccaagtcggaagacgattcccgtctcgcctcgagaaagtatgcgaggatcatccaaaagctcggtttcgacgccaggttccaggagttcaagatccagaacattgtcgggagttgtgatgtcaggttcccgatcaggttggaggggctcgcctttgcgcatcaagctttctcgagttacgaacccgaggtgagtgcgggcaggataggccgatagctcgtcccgtcgaattcgcaccgatgccgtatcattctccctattgttggcccccggtagttgttccctggtctcatctaccgtatgatcaagcccaaggtcgtactcttgatctttgtctctggcaagatcgtcatcactggagcaaaagtcagggaggagatttacacggcgttcaatcagatttataccgtcttggcaggtgagtcgctcgtgcggtactggaatcgcaaggggtcacgatcaccgggatactaaatgcatgttttgggctcggccgcacaatcagaattcaagaaggaatagaggaattcggggggccatgtacgtttcgcatgcctcgccgtcctgattcagtggacaggcgagtcgtgtgaggctcgcatgccccgatactgatcgtcccagcggctcctggtctggttttcggctcgatcggtctttatcccaaattacgacgacaaacaacgacaaagcctgagatggtcacggaatacgcctcttatcgaccgctcaaatgcagatgtggagttcgattccaccgtcaaatcgatgactgggcacagcttcaaacaaacaaacaatacgcacacacatgaaggcggcagaaggtggtcctgaaaagcaaaccacccgtgcacgtctctcccccatcgcatcatattgtatgacctcacccttgtcttaccggctcgccgtcgtagtgatgagccgagcgctacgagctcgatacgttcgttcctcaactgtcattatctgctgtacggcactgtggacgacgatggtatcacatgaataccaattagaagctttagcacgaaagacgtatgtggtgatgccgagacgtgaagcgaggatgtggtggtcaaacattctagagtagttcatgtggtatggttgtacatccgtctctacggtcatcgtgcgaatcaggggccgggatacttttataggtgcgacccggagaagatcaatcgtacactagaatccgcagagagatagaaagggagtttagtcgtgtcagttcgagtcgtacatcaagtagttgtcgtatgagcaagtggacgaaccgtgtatgatggcctgttgcgacatgaccaaaacggttagcgttgctgacgagaccgaatggacgacctgacgagcgatgagaacgcacgtagaatccgatccagaagagtaaaaaggtcaagaggttctcttgacccacgcccatcaagctccatatcgccttgacggtcaatctccatcctttggcggtatcattcacatcgtgcagactgggcaagaacctctcgaggtcgaccttgcccgtcttttcgttacggcacttcaagagcgcgacgacgccggcgttgaagagtgaggcaaagatgtagagaaagaacccgttcaggttgagcagaccgaggattccggcgagcgtcccggagaataccgaagtgagggtgcagaggttgttgaggatgagggtgttgtgttggaccgaagcgggatgaagcggtgagtatgaaggagagatggtgctcggtccggctgagttttccgggtttccagggttcatcgttgagtgggggggggtgtatttctgcctcttctatgatctacaagtcgttgttagatggccaggttgcagtacaataagtaggtagtagtagttaatggtcatcgccttgtagtcgaggtcgaggtcgagatcgaggtttcctaattgttcccgcgcgatggacatgcgaacggggcagtgagtgatatgttgatgatggttattataacagaagggaatcaccctgtcatgaccgttcgaagctgcaatccctccgacctaaagtcagaacatacggtatcaagagcacatctcttcggtctgtgtcaatcatgaccgacgccgaagctccagctgctggacagcctgcccgaaagagcatagaagagagcctacccgaattgaacgtcatcgagtcggacaaggaacaggagccagacatgcaggacgacaatgacgacgatgacgacgaagattttggggaggtcgatctggaagatgtgaaggacgacaaggagattgagccggaacaggtcgtcaaggtggcaaaggtcgaggtacctacgtccacctctttgagagccccatcaccgtcttcgatcgatgacaaaaagaagaacaatcgacgggtcaccatggcctttcgctcgacgactccttccaattcgagcccagcgctcaccaatgatgactccgagttcccaccgagaccgagcgaggaagttgtaaaggaatcggacgagcacatcgagccattggaaatcccggacctcgaagccgtctccctggaagaggacaagaacagtttacgtcccgagcgcacgaacgctcccgaccagacctctccttcaatcggctccaagctcggcctgaccacggcctttggctatgccgcctccctcttgccatcaacttctccctcgaaattgttggacagaaccactaacccggccgagaacgcgtcagctggaccgtcgaggacctcttccccctcgtcctcgacgccaatgccccaagatcccattcgcgacgagtccgcgaaattatctgccccacctgcaccgtctgggtcgtggacatcgtcgtttaccaactattttggaggttccaaatccccctccgcagcgtcccccttgccaaacattccctcaccgtttggcaagggcgcacggcccgctccccccgggcggacagattctacggggacggcgttcctcttgcacaacctggacgcgaccaaggaggacagacgacaatccgtcgaggcgggcgggtctatcgcgttgaaagaaggcttcgaacgggtcaagcgggatagcaccaggttgagagaggcggcggcttatggcgatatcggcgagtttgacgaggacgacgacgatccaccgggtcccggtcgacggagatcatctgttagaccaccgccgccgccgccaccaccccaggctaaatcggtagactattcggacgatcaagaaccggaactcggtcctgatggtgtggattggccgttctggggatgcgtgatgaacgactacgaagccatcgcgcgtagtcgaccgagagacctgtcgagagcgattcaacaggggatccccgccgtcgtgagaggaaccatctggcagttgatgtcgagcagcaaaaacgtggcgttggaatccacgtatgcggggctcttgaaggagaagagcccgcatgaaaagtccatccagaaggatctcgcgaggacgttgccgggacatcgttatttcgctcagggaggtggagtcggacaagagaacctgttcaacgtcgtcaaggcgtatagcttgtgcgtaggaatcccatcagatcgcgctacctgagcggaattggcggctgacacgggggattctggtcaacaggtacgacgtcgaggtcggttacactcaaggggtagctttcatcgtcgccgccctattgctaaatatgcccgatgaagaggcgttttgcgtattggtacggttgatggagtcggtacgtcatgccagtaggcgcatccgacgacatcgctaatgagctaaccgaaccttcatctccgtagtacaacctacggacgcattatctgcccgagatgcctggccttcagttgaggatgttccaattcgagcggctcttggaggaattgctacctcttcttcaccttcactttgtgcgaaagggcgtcaagagctcgatgtacgctagtacctggttcttgactctatttacacatcggtgagcctcgtgccgcttccataatcgccacatcgtctgattgtttcccattccaacaggttcccgttatccctggtttacaggatatttgatatcgtctttgcagagggcatcgaggccattttccgtttctccctggccttgatgcgacgcaatgaggacaagctgttggcattagatttcgagggcatcttgaaattcttgggaaacgaggttttcgattgttacaaggtcggcgcacgcggatatggctgcgatgatgtcggggctcttattgacggtcttcgacttactagacgactacaaccctggccggagaagacgcacctagccaagaagaagacgccgaatggctcgccaacgactttgtccgggatgcttatgcaacgcaaatgtaagctcagtggaaagttacatggaccgagcttcgactgattattctcacctttggaaacagaacgccgttcatgttggactcgtacgcgcacgaatgggaggaattgtgccgaatcgcaaacgcacatgcgactgaaatggacaccctcaggagtgcgaatcgcattcttaccgcgcaggtgtgagtgaatcgctactgcggctcggctgttgtcgcgatactcagttcatttcgttacagtaaacaactcgaaggggcaatggcggcgatgtaagcaatcgatcagcgtcaaggcggtctgcgtcagctgattccttttgcaatgttcgcaggagcgaagaacacgtcgaaatggtcaagcagctggtgcaagcccgtatcgacaatgaagccaccgaaaacgaactgatccgatacaagaccatgtaggttacctgaatggcgtgcgaatctgacaccatcagcgctaattaagtccggcgattaaggtatgctgagctcgttcacgagcaggattctaaccgggcgagctatgtcgcctcgacgccaaagtcaaagcagggcaatccttccagcattcatcgcacgatcagcaatggatcattcttgagccagaaccatagtacgatgtcgaccaccaccaccggtgagtgcccggctgagcttcgacttctcctccggtaaagcagctgacccgccgcatttatcgcagctacgttccacttgaccctcatgcgagaggccttgtcctattcatatctttgcgaggtatctcctacagcgttctcggtcggggctatcatatttctaccaagatccgcctccgtcccgctctttgaccttttgtcggcggtctttgcacctgtcgaccgagaaggcctcatcctatcgcatggttactcgcggcagataccaggaaacactcacgcagaagcgaatgcgatcaacaacctagtggcccatcttcaaggcctccccgaggagaccaccgcagccatcaagaaaacggccggactcgctacggacgcgacgagcgaggagactggccgaagcgtcctcggcaaggcatggatctatactacgttggagccctgttccaagcggacgagtggactgagagactgcacggccgaagtcatacattggggactaaagcgtgtatacatggtgagaatgtctcagggcaccagtatcgttcctgttggcttacaaacatcctgcgcgattctctagggagttcgtgagccgccagactacgtccagtgcgagggcgtccgtctgttgcgggaagccggcgtcgaagtcattagtgtccaaggaatggaagaggaatgcttagcagctgctcgacgcggactataattggcagccactcgttcacgaccgttgtcttggttcttctccagaagtcgttgtaaccacttcatagcatatcgatagaacaactatggcatctaagtggggggtcttcaacttgaggagtcgcaccgactagaacccaagtcaacgcaatctcaggccagagcaaagccgtcgtcgagctacagaaccctagatccctcatcagagtctctcggatgtagacctttaagatgggcgtgactagaatcgtggatgaaaacagattgacggaatgaatcggccgatcggtgaagtgaatgcgcaggcggggcggggcggacctcgcctggcgattattggcagcgaaagggctcagctcccaggcaacatccattttccacatgcgtatgaacccgcgtattctgcgacgaatgtgaatctaatttcggtcatgaggcaagttgctacaggtctttctctcgcttaacatcatccctaacgacgagcttttcggtaggctggtattcctccatcgccttgagtctctccaacaagctgggatgcgagttgtggtaagtcgagtagagccagtcctggtgagggctcgacaagttttcgttcatcaacttgatgagcgacgacgagaggagagccttgtatcgggggtcaagcgcacaggcgaaacgatctttgttcacatgacgatggatgatcagtatcgccttataatcgttgtttgggcgaagagctcaccagcttcgtattcgtatcgcctggtgatcgagttgacaacaaggctgatcaagggatcgagcgggttcatgatcaactggtagaggaagaatccgatgatgacaggttgctgtcgaacggcgacgtcttcgctgaatccaaatgaacggaagatggtcgggttgtgaatgaagagagtaaaggcggagagggtgatcaggaggttgatctgtccgacggccatgagcttggtaggatgggctgaaggatggagagagacacataaatcggcttgaacatttggttaatcaacgtcaaaatctgactgaccatatttccaatgtccgagctcatgagctatgcgagcgcagaaacggtcgatcaacaaggagtctactgatcaggaaacaggaagcatctcaccgatcacagcctcgacctcttcaggcttggactgctcgatcagagtgtcgtagatgacctatggagcagaatcttaatgtgagtacaccttcgattgccaatatcctggctttacacgtacgatatgcttggaccagggaagtccgtaaaagtacctggatcagatcaaattgcccgtcagatcatacttcaactacctcggtaatcgaacatggcgcaggaaagactcacgcgttcgagtgtccgcttcgcttgctcccgtcgatcacgtacaagtgcttcagagggaacccgagcgacccggcgagcttttcgatccgttccctcagttctccttcgggtaggggagtgagcttgttgaatagcggttggataaagataggatagacgagttgcatgataaaagtgaatgacaggctgaaagcaaggagatgacgcaaagtgtcagtccgtaggtcgtagacggggtatgctcgggtcgaacacgccgacgaaagggagaaagtaggaaaggactctcacaagaagaccatcagagcggggatgaaccaatctccagcccaatccacaatcttgaggaaggcagccatgacagggagcccaatgacgataccgacggcgtaactcttgagctgatcggtaacccagagaccccaggtggacttgttgaaaccgtgtttctcctcgatcccgaacgtgccaaaggcggacaagggtaagctggggagagaagaggcgatggtgaagacagcagcatagagcagggagtgggtgatctaaggcgatgcacaaagattgatgagccactcgacgggacgcaggtacgccagcagaatggagaactcacgacgcggtcacctccgaaacccattttggccatccaaccaccagtcaaagtccatatccacttgtaagcacctcctccgatgtagagggcgttgagtgtctgattataagcctgcttgaagagagcccatcgggtcttgtctcgaccataggcttgggacttctggtacgtgtcttcaggaatgtggtcggcgagagcagcgggaggagcaggaatcgagtaacagggtaattgccgggtactgagcgttgataatagtcaggtcccgatcgttgcggttctcgtgactgtacagggtgatgtactcacaggatgtagctctctagaccaaagatggcccagcttgcaccgagggcaaactttttgtagtcaatggccgggttctggacgatcgtgctggctttaccagccaagaatccgaggacgtccatcgttgatttatcctccagctgcttgcttggagtttttcgctagcggtaggtcatttcgagactggcagttgtagatgttaagggaacaaaaggggatatcgtctaaagtcgattgaaagggcaagttgatgtttcggaaccaaattagattccgaaacgacacgtcatgttgaatcaattattgtcgttacaagttgatctagatgaaacatgtcataactttagattggagagggccacgagtatcgtccattagaccgagtccagcctacaatgaatgatgattggccaggatatactgcaggaccatggctaccccgaatacctagactcctggacacgcttacttgggtcaagcctcgacctcgattctgtccttgttaaaccacgaatattgcggaggaagcaagccatagcaagacttggaagtacatctcgaatttttattgctcagaatgtatggagaattatgcgctccaaggtccctcaagcaaccttcacgtcttgttcaattcggcatgtcgccatcggaccgactcgaaagcccaaggcaaacctagcagtgcagccgataggatcagccacggtgatatcccccaccagacccggatcccaccggcttccaaagactgatatttgtctactcccttatagctcgtcgccgaagccaagattccggcgatcacgacgaacgtgacccagatcgccagagtagtggcattggccaaaaggaggtgaagcgagatgagcgtgtagagcctctctttcgtaggatcggggtctttacgaaaggagtacctcgtaccgtaagcttgtatgaaggtcgagataatcagaagaacgaagcctagtacttcaaggtatcagcacatgcgtaaagtcgattggtgcgcgatatccgtgactcacacaccaacagcaaagcggcacccctgctcaaacttgtactgatcgcacccggaagaccgatcccaacagcctgcctatcgacttgatacgaccacccggtatctatacacccgagcggatcataatacctcaccccttcctgcacggtcacgttgaaaccgcaatagtctttcggaccgaacctgacttgggtcgtcagcgagttcgcggcggccaggtggaccgaagacgctgatgaccaagtggcggcgcagatgagagcgagcatgacgattgggtaaagaaggtgccagggtaaaccggtacttcgaggaggcgacatacttcaaagcgctgtaagagaaagtagagagatatttgtattgtgatgggggcttaagggagacggaatagggtatcccggacctttgaggccggacgggcggacggaggtagaaatatccagggaaaggatttcagagaattggcgaatggattgaagatattgagggcttagggggataaggaaggggatgatactatagacaatgagaggctaggtcgagattatgcgattggagggcttgaagcgagtcgcaatggccgacctggtgtatacattgcggttgccaggcggtctacctagctctgatatatagaagaatccagcacagcccctgattgtttcgtgcgagaatggtatcaggtgacgtaacgaaaacgattcccgtcacaaaggaagacgatgaccccataatactatgaccgtgcatgctttgagtcatcatgcaagcccttgcccacaggaagccagaaggttataatggtgtgcttttgatgccagactgccctcgcgtatctgcgatgaaacgttctgttgaacggaatgcacctcgatgtcgctcgatagcctcgccattttcatatgaccacctacgatttcgacaacttcacgccttgcatttgagtactgtcttcgccgattttaaattcttcacctcgaatttcggtatggtttggactctatcgtcaactctgcgaatgttcgtaactttaccgcatatgctgtgcggtttcgtcaatatatactcggatacctcaataaaccgaaccaagacctgtttagtcgtttcagtaatagccttagctgacgtacagtcgtgaaaccctcaaaattgctctcttcggaaggcatttacatgaccagctgaaaatgcaaatccaccgtcacttcgctctcgattgttgcaagagatattcgcctcaattgtttcaccttcatcaggtcctccacgatggttactaagaataggtcagtggtggccggttcccgtcaggaaggaccgggatcaatacacgatggcaatttaaagtttccaagcagacggaagagcaaggttcaagaggcgcccgagtacgagtacttttaccatcctctacacgtcatcgtcagggatcctaatgcgatcggcatatcgatactgttcgcgcaaattcgtgagggttatactagtagatattatggatgttgtatcccttggaaggaagctggccctctcctgtatacgctgccgaaactagcggaaacatgaaaaaccaaactgcttacgccgttgttgtcgactggcttttcgcggcagccgtgcgatggtggtgtctcagatctgccggtatgagatccgctcgcgacgggtcataccgatagcagttcacattcatgatgccgaaaatcctggttccactcagtatgttgcatggtcctgtaacatattctgtcctttgacgacaatccccgatggacgaatcacggctttcgaaaccctgaccaagctcgaaagggaggcactctgcgtcgataagcgcacggtgcgaatagcatcccctgcgtttcgacaggaaacctcctttatgagggcaaggacgggatcatttcaagatctgccctttgatcgcagtgatcttggcatgctccaatgctcagtagagcttgtacatggcgttctaggaaaagatgaaaggggtccaaaacgtagccatccgtctgtatccgacttagtataagactaccgacagatcgaaattgacaaagtcattgcttcatttcacaaccgttcaacgatcattttccagtcaccttccacttcaaaccgttctttatcagcaggctgagcctatatcttcgacacactcattaaacaccgtcttgaacagccaatatggttcatttcttgagcgccattctgttggctctgtccaccatttcgactctggtgcaagctacaccggtggaagtccagaaaagagcttcggtggtgagtcgacccgcagccccgctcttggtgtactcgggtgtgtaacgaaatgtgacctgactcgtttgcccttgtcgtacttcgtagaaagctgggatggcctggccgaaccgggtcccccaagagaaagctgaagcgcttaaatcaggtgtaagcgttctgttacaacatcttatcactctctttttataaagtacgaaccccacaggacttgtcatggtactttaattgggcccctacgccccgcaacggtcccggtgaattcgtcgcgactgtaagtggatcgtcaatcctggggagacgctttaaggttgttgatggtctccctgaacatattaacagatttttgaagaccagcctcatgatcgaccggttccggacgttccagagggcgcggtggttctcggattcaacgagccggaccgtcagtgacccagtccgcgtctcgataggtcattcccttgagcgataaacctgaatttttgctaccatgaaacgagcgcagagtgtggccctggccaagcctgtatgcaggatatagggcaagctgtcgattcgtgagtcatatcccgtcatgtctgtggtcgagaagcctgttgaaatggccacgattctagctggatgcgtacgatggtaccgctggctcaacgaggacacaagatttgttcgccggttgaagccggagacaatggctggcttggcagattcatgcaggcctgtcgagaccgcgctggatgtcccgtgcccgtgtgcatcagggctcatacctatcagacctcagtcgaagccatggcccagtacctcgtgagtatcgactgctggggccgcatggcttgacctatttgaccgatcgtacttttgacccggcagactagggttcacgacacctatggtcttcctatttgggtgactgtgcgtgacttgcccccttagctttcgtacgcagcggaacattccagctgatattcccgtgacaggaactcgctgaccacaatttcgggagcggtggaccccctaacatccagcacgtccacgatttcatgggtacgtccttacctgagcagacgcttaccctcacgaattcctaatgtgctcactttcacacccatatttgacacttcgtaggaggagctactgaatggcttgacaataccccgtggattgaacgttacgcttggtttggagctgggcaagcccaggatctgtacggcgtcaacccattgaaccgcttgcaattcgacgatggcagtctcacgcctctaggcaggcaatatgttggtggacgacactcgtaatgtgatttgattacgctgtcgaggagtggctgaggcggtgaagcgcgcatagaacgcagactgccgagcacagtactatatcgaccttttcgacacccagccatggacgcttcgctctttttcccgttaaactgactatatacatatatcccaaattcgttcaagcagtcaatcatggtcacatatacagtatatcgtcgtctctttgctgatatgaattgcgcgtcgagcgactggcacttcctaggcaaattttcatcatcttagcgtcgtcgcacgataggtgcgatgtggccaattgtacaaagactatcagcctgacgtatgatcgaagaatcaaatgactacgaaagtttcgtagcacacctgtctgagcctcgtgactatctttagtatcattccattcctgctcatgagtcgcatctttatgaagaaggtaactttggttgaaaggcgtactcgtagatgttgtgacagcgggcttgtgaaacagcaggagatgcaggggccgactatgaatgtaacatagttgccaccatgttcctgttgtcccaaatttcccattatcccagtcctcagtctgttgagagattcaactcttcatttgtctcgaacaaggtcagtctcaaagtcgtcttaacgttgtcttatagccgtgtttttgcgcctgatatatgggaatggttgaaaccaggtgttcttctccaatccaattgcgcatgtgttggctagccatgtcaagatctcctgcaaaagacctgattatgttgtcccgcaccagcatcaccaataagactatcgttgtgtcggaaagttctttagaggcatagtggaaaaacacatcttttggctttttcacaatgacaagactctttggtataacacggatacccagaagatgtcagaatacttatggacggcctggcacggcttggcaaagaccggacggagtttctacttcatgatggcggcgggtctatgcagtctgctcatccaacagacaatctgtccgagatgcaaatgcaaacaattgcctatcatatcatagtctctggcaagttgttagtggactcaagattgaggtccgttttgagtccaacaggcgcatcgagacatgcgatgtagatgttgtggtagcggacgatgggaggattcggccttgtccacagtattccactccgtataactactaaccacaacggaactctcatagcttctcccactatctgcacaccttttgttcccggcaacgttccactgaaatcctcatatcgcgggtcgaggggtttgaacgtatcggacatgccatcaccacgcaatttcaacgagatgagtaggagacgtctgtggcctacatgcagcgtaatttgcgtgttgagatgaaggcctcaactcccgcgcctttgttttcaacgcaggtgtctttgcccatgctctgagcgaatgctctcgcatcagcggaccacattgcccatgtctctagaattatttctacacgatggtcctcttgtgcgggtttgcgaatggcggagaacatatgaagcaaatgctaacgagcggatgaaggaatcattcgcgattccacgaatcgacccgcgaacggacgatccttcgaacgctacttgaaaaaccaaagatagagaaatgatcaccttaccactgtcctttggccccatgtgccggctgtaacttgaaaatgcgacgacaagtgcacccggatgatcaaaaagaatgagcatgaagaattaagtcaaaccccggtcgcgtctcgcagatctacaagtatcacacactactctagtggtcgatgatggcaagggatccggtaacgagctctgcgcgatgcgagacgaaggtgatgtgttagcaagcgacagacgaggtgatggatgcagagctcgtcgacatactgttctcgagtcgactgccgtcagggatggtgatcttgttaccgtcggtggcgactacggagcgtgatcacgtcgggtcagctacgtcgtcttgcttttacaccgtgaacgaggctccagactcactgatgatgacggtaccggcaaaggtacagttcttgccgatatgtacgtctccctgtgatcgtcacgacgtgtcagccgactggcaggcgaaagcgatgacgaggcgctgcactcacgttgacggtcaagtggtcgagctcgacaatgttgagacctcccttgacacgacgctcaaagtccgagaccttcttgaactggtcgcctgtggggtcgagaagcgtcagtgcgagatcttgcccgtgagcgagctggatgtgactgaccgagcttgatgacgggggtacccgagaactgcctggccttgttctgaatagcacgaagacgagatatttgtcagtctgggctgtttgacaagacggaaatccggcccggctggattactgaccatggtcaactgtccgtgctccatagtgtagagaccagacttgctgcgaagtcgaaaccacgtccaggtcagcgatcatccgttcaacctcgaaacccacgatcgaagctcacatcaagagcaagtcggaacacgacttgacgggcaagaatcgggatcgggggacgttgactccgatggcgttcctatacgggcaaaccgggatcgaaagaggcgtcggccacttgtctcgagaaaggagaaccgcgcgctggacgcaaagccgagtctcacctaaagtgcttgatggcggcaccgatagcggtctcgagctgaatgacgggctctcccttgggggtgaccttgttgttgacgatgatctcgaggtccaactcgtcattgtccaagacgcgcttcatggcggtcaacttcatccacacgctgttggtgttgaagatcttgaacttgttgacgttcttgaactcttcgaggtggtcgctgggaacctgggcgacttcgagcaatcggaggtttccctcgtagtcgatcaaggtacctcccttgacgtcggccttggtcttgtcggtgagctccatcaagtactcggcctgcgagttgatcatttgctggtaaatgttcaagtcgacggtggcacccaggttgtcgacgttggagacaaagatgtactccttgccggcagcgatcaattggtcgagcaatcccgagttgctacgcgatggtcctcgtggtcagcgacgtcgctcgattcgactttttttttgcccaccgagatccccgtcgactcacttgagggcgtccaagacgtttccgtgaccgggagggtagaatccggcattgtccgaatcggcctccttggcgacgggcaacaaggtgtcccggttgactcgggggtacttggactggttgaaagtgaggatgttgatgttgtggttctctgcgagcgattcgggcgaggcgggcgagtcagccaatccgcgacgtgtgcacctcgatgccatttggttgtagcgacctgtcgaccgcgctacgagctacttaccgtacttctggatgacccggtcagtgtcctcggcagtgttgaaactcgacatcaagatgaagggaacgttgctgcaccatggcgttgaaagcagggataacgatgtcagctcatgtgtgatcgagtgtcgatccccgcggagcgagggggagatggtggacgagtctgacaccgactcacacgttgtaagtctcgttcaagtgctatcgaccaccaacgttgaaacgggaatcaaaggaccgaatcagcctcgcccggatctttcacaccccgatccctcccgcacgtgccgctcgtctttcttatcggcgaccatgacgacggggacgacgacgacgtacctcgatctgcctgacacacaagtccaaaaaggtcaacccgtccctgacctcgatgacgctcttgggtccctgacaacccatcgtagtccccaatccaccgttcaacctcaagacgacgagcttgtcgagcatcgaagggtccagcgagtctagttgttggtatggcaggatacgctcagcaggggggccgttgaccttgtcccattcgctgtgcggtgaaaagggggttggaagacagggtcagtgaagtgaaggatcgagtgggtgggcagggcacggtcgtcgacgactcacattttctcgcccttggccttttcagtcaagtaacggttgaacaacaagaaaaagtcttccatctcggccccaaagatcctcttggcctcggggtcctgaatgttgctggccatccggttgagctcgttacgcatagctttggcagcgacactggggacggtcggatgagggtcggggtaggaaagatggggaggggggagatgagagagagtcagcttccggatcaaggtgcggtccgctcattcgagaccggacgagattcgactcacccagtgctagcggtttggaagtcctgcattgagtacaacattcaacgagtctcagcggtggacaggacgtcggacgatgggaaaggacaggatactgacgatggtggtgctaccacggttcctcttggaggcatcaccggcggcgctgggtttgaggttgttggacatggttgcctgtgtggggggaattggttattttttaagaggggttttattgggatttttctgtatctctctccgggacaagattcgatgtgggaaagcgatggtagtctgcgaagtatgggtatgaatatggatgatggtctccgagatttgatgtcgaggtggttggtggtggtcggtggtggtgcttgggggttgggttgatgcgtgttgacaatcccctaattgggcgtttcaagcagacgacggcatacgagatgagcgctagtctcgtgggctcggagatgggtataagagacagcccgcagtgtggcaagcaggcatacccggtaatctgtcaaccgaccatcatcgtccccccccctccgccaacctcgatcgaccgaggacgaggacctaccgctggggaatgtcgcctttgtccgaaaacaggccgtccccagattcaccaccagtaaccgcagcagcaccacctccctcgtcccgctcgttgagatcgccatcggacgctgtcatctcgctttctcgtcacgcatcgtcctcttcatcctcgggtgcggtgccgtcatcatcgcgatcgtcacagcaacgccagcgacagcagcagcagcagcagcagtatcgccaagacgatccattcgaccgtcgtgaactcggcttcatcggcggcgataccggatcctcgtcaacctcgacgtcaaacgcacgacccgatcatcatcggaccagtccgacttcgcatttgcgtcagccacctccgcacgtcgatcaggtggtaggtagtcacgaccagaccaagatcccggacggcaggtttgccaggttgatggactcgctcggacggagcacgggaacacgagcatcttcttcatcgacgtcagtcaacaagcagcagcaggaacgacaaccacagaaacaacacttctctaacaacggcttcgacggtcggaaacgttctgggtcagggagacctcaacctttgcccatggatcaagggtactcgcatagcaacccgggcaacaacgggtacggtaacgggactcagcaccataacggttcttatccccagtacgctgggagcaacgacctgaaccaatcttcatcctcccattcgagtaccaataacggggtcaacccgtccaacctctccacgacggggtataacgcccacggtggaccattcatgccaggtacgaacccctcatggccggggacaggcgggtcctctcatcacggtcaagacttttcgggcaaccattcagctggcggtcacacgagcgcgaacgccaacgcggatcagatgcgacgaggatccgtctacggcgattactctcccaaccagaaccatggatccgggagtgcaggaacgggggagatgggaccgggatcgtacgggtcgatgaactcggccggaggcttgcgaaatccgggtggtcatttcggagggtccaacggggctcctggcggaggaggtccgtctttcgcgttcgatatgcagcaacacgctactcgacgcaagtttgggaacgggtctggcatggaggacgatgatatgcacgggcaatcccagtactaccacggtggcggcaacgagtcgtccaataacggaagcggagggaagaaacgaaaggtctcgatcagagacgaggacgaggacgacgatgacgatgatgatgacgacggatccatgacggggaacaacgattcgtcccgcgggaaacacgcttcacgaggcgtctcgagtggggctgggggaggtggcgacaaggatgacgagaggaggaagaagagcgggaaagaacgacccggtcgggggaagggtatgagaaggggggcgagagcgtgtacgaattgccgaagaggaaagaaccgctgcgagggggaccacccttgtaaccggtgtgcggcacaaaacctagaatgcgtctttgccaaacctccgcccaagccaccgaattcccagcaacacgggaatggcaatacgaacgggagcgggaacggatcgtcacagttgcagcaaaaccagccttcccagccacttcgcatgggagggaatatgagcatgagcatgggtctcggaggaatggggatgagtgggatgggaacgggcaacgggatgcaagggaattggaatcctatgggggaccccgagggaaggtttatgcatatcgagagttcggtaaatcatctcgcagccagccaaaatcagatgcagtcaacggtgagtaaccctgatcaggaagcttggccgtgatctccaggatactgacgaggcctgtccatttgcagctgtctcaaatcctctcggcattatctcagaatcagatgggaaatcaaaagtccaaccagaatgcaccacaactcaactttcctcaaccttcacccccacataacaacggcatggggtcttcgcaaggctcgctctcgatccaacatcatggcgcgcgcaacatctctggagcggatcttttcaacatgaacaatctcgcacctccagacgcacaggattccgcgaggctcgacccgttttcacccgggaccgtcgcggccttgacagaagtggcagtagcgaatggatacacaggggctaccgttggccttgtgcatgacgggaatgtcatggatgccacttactcaccgtctgtcggcacgagcgcgggtggaatcaagcatggcaacgagattgaccaaggcagtgcgccgggaagcggcagtatacacaggagcaaaccccggagagacgaggatggtttcgcctggccggatccgccattgcccaaagccccgattgccaagatcgaagaggatgtcgaagaagatagcaaaccgaaagaatacccgaaattgcccggattcaaaccacccccacatcgttacgccaactatggtctggtcgtatcgtccaccgctgcatcatcagatgacgaatcggaagacacgttaccgaggtccagcttgaatgccccaatcgaggccctgcatcagctcgccaacgccgctgatcaggcagccaaagaaaacgcgcagctcgaggcagagaacaggcgtcagggattcctcagccctccacgggttttgcagaatcagttgaaattcaagcgaaacaagaagccagatccgacgccgagaaatgccttccctgatgttgttacgaagggcctagtcacaccggaagaagctagagagctgtgggatatgtgagttgtctcagtcacatacgaaactgtgcagccagctaacacctctgcagctttttctcgggttgccattatttcatacccgtattcgacccgagctacgacgagttcgacagtttcattcagcggacacccttcagctttgatggaatgctagcagtcgctgccaaaatccgtgcaggtgcaggtgagtatctgatggttgactctagtaaacgtttacctccgcttaccagtcgaatataggccccctcggtcgaacacataccaggtgtctagaagaggcacagggtatagctaggtcaacgctgtttggcccggttgtacgcaaggaagccgtcatggccgtgctcatccttgcctcctggtcgcaagatccatggctgccgagcgggcatgctctccgcatggggctggacatgaacttgcacaaggccttggaaaagcttggggaagatgtcgggacttttggaggagggaaggctcgaacggatgcagaggagcgagatctaggtgagccatatcatcgctgtgccttttccgaatccgtactgagtcctcgatcacatcgcgcttttctcgttctagtcgtgtcggcacggatctggctgaactgttatctgaacgaccatacgtatgtataagctaaggttgtgccgatgatcctccgagctaaatcacctttgttacgcacagtgtcagcttgggaacgggtcgaccgctgatgctgcgagatgatgagtctgtccggaacgctcgtcaactcctgtcagtgtggacggaactttttcgtacgagctttgactgatgcttaggctcgttcagaacacatcctatggcgtcggagaccgacgtgcgtcttgttgcatgtgtcgagctgatgagccacaagggtgagtatcgacatcgcgacgcgtcctgcacaacttactaagtagacctcgcgatagtgcgcgtttggactcacctccaccccttacgcggacgcatcgactccacgaccatcgactttgtccgacgggtttcgaatgatcttttggcctggcatgccgaatggaggacacgacatctacagaagcatgaggaggagagcgtcctggtcaagctgcttgatgcggaattatactacgcgcaattgtggacggcgtgtgtggctctacgaggatgcaattgggacaagctcaacttggaccagcgagaattggctttcggagccaaagatgctgctctaaagtgtttatctgcctacaaaacatccagtctacggtacgtcatttgcgtgaacagcaaacccgatcgctagactgaacccagcatttaatctagacactacctcaagtatgcagttcatgaaacgatggtccaagccagtttcgctgccgtcttcctcctcaaaatcgcgatcttattcccagcgcaagtaacggccaaatttatcagtcaagaagtttccgacctcgcaaatctcatgtccgaatgcgctgctgagcgttacgctctcaccctgcgacttatgctccggtcgttccgccgcaagatgggagagaccacgatggcaccgggaacaccccgtaccatggccaatggccaggtggctggccctagtgtcgacggaatgattcctggtcatcgcggcctggaaagcttgctgagtatggatggagatggtgccgtggacttctcaatcttggatgatctcggacccttcaactggcccgaagacggcttcagtccttccaacttgccacaatggatcactgaaggagtgagtcgagtcagaggtccagatacaactcgctatgagactcacgctttgttcgtcgccgcctctgcagaatgtcatggatttgggtctaccttatgacgggtcagactccatcttcttaccccctgaattagccaacatgttcctccccgccccaacatcttggcaactaggcgatagtgcagaaacaggggctgaagcttggtgaggagcaggacctttgacgaaaaaaggaggaaagtttccatgcgaaaggatgcgtcaggccatgaagaaggccattctggctcaaaatcaagttttaaaagatttctattgcttacgaggtccccactatataagattcttcatacacatagtctcagcttggacctgatactataagatcaacgttgtatatgtcgaccagaagtcgcaaaggacacgacctgcatgcatgccgtgttgaatttctcacctaacatctgcttgaacgtgtcacgtgattgctttcgatagacccggtctcgatccgaaagtgctcgctacatcatatctggatgatcaaagcgatcacttcgattacttcgatttcgactctggctatcgtccttgccaagaagcattcctcaaatttcacatcatggtgagtcattcctcgcgtctttgaaatggggccgcaagcctgattttccagctgcagtcgcaactcccacgtattgcatgggcagctacccgaatctttggtcgggcaatgcgagaggccggaaggcaggccgtagccagtgagtcttcccatactcgactggttcgaaaagattggcttatcggaaggttctagatgcacgacataagccggaaggtgtagctgactcgggcaaggctggaggtggaggaggtggcagttcgcagaagttgtcttcgacgcacgggatgtccatcgaagaagcccaactgattttgaacgtaaagaagggcgattcaatggagaagatcctcgaggtacgcaggctattctacgttagatgccctatcctagctgaatatcatctgttctccgattagaattacgaacggatattcaaggcaaatgccaaaccagaacctcccgcggtaacagaccccaaggccaaacctaccggtcgaaaagggaaggcgcctgccgtcatctactcgcattacctccagtccaaggtcttccgagctcttgaacggataaaggccgagaagggacccgaggctgttgcagagggagcagaaggcgagacaatggtggcaggaacggctgccgaaggaggagtggctcctgaatcgctggccaaagccgcagcagaagctgagcctttcaccggagctggacctggtcagggtccagtaccaggcgaaggtcccgcacaggcggccgccggccaagctggtgtgaatccgggcccagccgaatttgccaacaagacggccgagtctggcacatccgagtcaacggaagaacccaagcgggaacccatctataaccctgctgtcggtcgggcaaagcccaaaggagacaagctcgccgacgccaacgaacctattcagctataatagcatcgatcaacgcggaaagagcagaaagagtagatgacaacgaccttgtaataccactacacacagataacactgctgccccaatatcctggaacatcctgtcgcaatgcttgctttagcggtcccggtcatgatagcattgcaacgtcgacctccgatgaatctacttttgaggcatgcgatgtcctcaagcttgtactgcatgcaggtgatgccgggtcttcattcaaacataagcgtcctgccctacatgtaatcgccagcggttttgaccataagggacgcagccttgaagtgatcgctacacaatcctacggggctgaccttcgatcgatttacagtgtcctgcgcggcgcgccctgcttattgacaaggtcaagactggctgctcttcttggggtatctacgggttttgccatctaagctgtgttacatcataggtcgacgcctcttaagcttcgttcagataaatatccgctttgccgagcgcccagatgacgaaggagaacttgtagtctggcatggggcgatttttcagacaggtctatctgtatagcaatacgagccgacttactcgggtagtcgatcgcgcagttcttgttaaagatcccctctgtatcttcctgtaaccatcgtccatcctgtccagccaaaatcttgagtcacggcattgccagtcgagacactggaacacacgcttactcgaagttgtctgctcatgatcaggtcaaccgctcggcggatgacctgcttatcggggtatctaccgtaaatcagagaaagtattacccaagccgtctgtacgacctgactgtcttcgtgctggcagtactgggcggtaacgcaagacttccgggcacaccaataagatcagcgagaatccatgagcagcctcaggcgaaattagcttaccatataagtctccccccagcctccatctggcatctgcttgcccgctaggaacgcgcaggcgcgtcgcacgctctcagaattcgcacaggtctccccagccaatgagagagtctcaagtgcaaacatagttgcgtaggtgaaacatatcgccctgcgtgatgtatgtctgatggtaagcttctcccctggacttattatctgagttgcgacacttaccaggcgccataccacgatccatccggcctttgcttgttgtgcacgtacttgatggccttgctcacgcacgaactatgggacatagtttaccgtgagctcaagcatgaaacgtcgaagctggagccgacaacgcactcgatttcttttctgcggtagtcaggacacactcgcagaaattgcagcaatgctgacacagaagaagtagtgcacctgaatggccaaatgtcagcttgatgacgaaaggtcgtcgaatcttcacccgctcactcgggataagtgtattcaaccatgatatctccaaaaacctctgcagtgttgagccattccatcctcttatcgcctcgtaccagctcgtagctagcaaagccgccatctggattttgcatcgtcaacagcacatctacgcaatccttcaatcggtctggtgtgacaggcgagggtgtgtagctagatggtcacagccgagcgtgagctttattttgtttgtccataagtaggagttggtctgacctgaggctctgcagactgatcactgctttaagaccttctccagcacaatcgctgacctacgtaaacgcatggcgtctattagcacagactataggcctcttgaatcgtgtttgtagcttactgtgtagccctgttcaagcgtcgaaaacggccaggccccctttgttgcgtgacggtaggccttgccataccatttcggattttccctcatctgacatttttccaaccagtctaggaggctttcggtagcctcccggttttgctcctcttcgcctagacccgtttccacgagcgcttggctcatgaaggccgcgtcccaaagctgagatccgtttgtacccgtcatcattagcccttcgcccgacatccagaggaaatcgtctatcttggcgcagtgttctttgaacgattcagactcgggtccatctcgatgccaccggcagatcatgttgaacatcttggacaccggcccgatggtctggtagcccgtattttcatcctccatgacgacgagttcgtaggcacgatcacagcccatcttgcgcaggggagagaatgcacattgctcgtacaccgccagaatctcgttgagaccgtccaggacagggtgatgcggttggtatatatctagctcggagacgttgtttctttgtttggagaaatcgatcgaatcgtaaggctcaatgtaaatttcctgcaaagggagagttcacaatcagcttgaagtaacgagagcgcttgttccccgcccattgacttctcggatagcctcgaccagtggtgtaatctcgccgacgaagcgaacgccgtaaagatagcccaaaggtatatctgatgggcccactcgtagataagctcgatccatcgcaggccggcgttgtttaatactcacagacgttcctggtgtgtatccactagtaatagaaacgagatctcgatcagtctcggccaaggtggggttcgctagcaatcagacgtacccaacgatgaggatggaaaggtacccaatccggcagcagcctgaaggtgtcccgttgttaggcaccatgtcatagccatagcaactgatttggcagtatctaacgcgtaccatagttcaggtggtacagggttcacaccctcccattcgtaggctcccaagatcgacaaccaggccttggcccaagaagggaccctgaccgctcctcctgcgattcggcgggatgatgattaaccgacccggcaaatcaaatggaaaagcatgagcctagaatggctcacccattttatggatcagaccccgaatctcgaccatctccggcaaatccttgtccgtaccaagcaatcgaagcgcgacgtaagtcatgaccgttccgaaagtcgtcggaggtgccgcggtgtgtctaacagccagattcattggttgagctagagttctcaaagctgtgagagcgatcgactcacagaccccaaccaccctcctcacgacgcttcgtaaacaagtatcgtctcatctcgatgatctgttccggtctcagtgaacgtccggtgacatacagcccgatcacgagacctgcagagcaaagcgagatacccaaagaggttgatcaagatggatcagacatgagcttgaaaagctgatgaaaccatcgtagcgcacctggtatcaagaacatcggtcctgaacacgtcgactcgaacgttagcttatttggcgacgatgttcgaccagagtcagccgtgatctagctcacctccataagctcccgtccagtgtccatcttcatcctggagacgcttgtagaattcaaatccatttctggcagcctccataggagtcttcggctccggtaattcgggcgctccctgtaacagatgatcattcgccaatcagccggaaccgaccgcttccaggaaaatcagcgccgacatcgacctactagatcaaggtccaaccaatacttggcgggctgactctgcttccacgtctctcgtctcggatcttctttgtccaggtagacccacttgtgttgcccatgcgagtcttccccgacgaccaatctccagccctcgaggtctgtctgttcgtaagggtaggctctcgtcgacgtagttggcttcatgacgatgatggctcccgttccttttgcactagctcgttccttattgcttatgaaaggatgtataataagaagactccgtacgcctagaatctagactaggctcaggtaccaggagtccccaaggtcgagtgacgagctgattgtgcaattgtgcatggtgaacgggctgatcgctcttgtaacaattcgcgaaagtcgaccgagcccgagttctcgtacgatgactccggaagtaagttcggaagtaatccctgctgacctggtctgagactttgcgtggaccatttgctcgtgctcgatgacgattgcaccttgctagtacgattctagcgcgacagtggcggccccgggcattgtgctgctctgctctcctgctcccgcctatggactgatctgatctgatctgatcaaaactttgactgattgctttgattaggtttggacctcgagggggagaagctcgcttagagctgtactcgatgcgatttgatctggcgttcagacgatccgacgatgaaagaggtcaaaatattcttttcagactgactacatcgaccttccccatgtcagaccctcgctccctacactcatcacccctgctctacctctagttcatactcttagtgctcctcccgactactacatccggataccccaaactacacgctcattgacatcaccgccctgctcctccgcaagaatcgtttcttcgcgtcaccctggacctataacgggccatatcgagaccccccaaatcctctcacatataactcctcgcgacaccagcaacctccactcatactcaggccacctactccttggatgccgctggcagtcccagctcccttggagaaccatattgatcaagcaactctggcgtgaaacatatcttgactgccttaatttcgacaaaatcactcgcccggacgcgacgccctttggccggaaaagcgaggacgtgcccatcatgtcactacttttctgcaatacccaccatgtatgttcccaatttcctcctgatctactgatctccgacttttcagccggaaatgctaatgaaccccgtttacccctatctatgccgaccgcaaccccgtccttcagttactccatcattcgatattcataccttccatcggcccgagacgagcggggttcagcaatgacctgtctcccttcgccactgacgacctgtatgatctctcggacgaggatgagagtgacagtgatgatgataccttcagcggaaaggaggcggagatccatgaggtgatcccatcggcggcggtcatcgaggaaaaacccgagaacagctttccgccagaaatcatggtcaccctcgggaactacgatcagggtcggaccgtaactagaccagattatcgggaagacaagtcggaggacgagaaagattctgatagcgacgatgatgaagagcagaacgagtaccagttgccgcggaaaattaaaccacttccgaaacgacgccgctggattgctgcacgtagacaaaaggaggtccgcccgcttccgtaccgtttcaacaacactttgccaatcacattcgtcctcgctttgcccccttaccgcaatcaattctcgaacgatcctcgacccgacggacagatgaccgaatacgagttttccctcgtcctctatgggttcatcaaccagatgtcggaacagaaacggttcaagtcggtcatcaatcacgaactcgctgtctacatccgccgatgcatgaacgaaggtacgccagagagcggatgcgcgggaagtttcaaatactgggcaaagaagatgttcagtctcgaggacgatccggcaggcgataaatcggacgggatgggagggaagtatctggtgcatgatgacagacgggtggcgattgttgaagatttctatgagctgttgactcaggctcatcagggcacgcagcatggcggacgggacaaggttatgcgcttggtaagcaagcgacttctagatgaatagactcgtgctaatctcgaaagggtgtttcctgcattggcatgtaacagatcaggaacgagtactcctacttgcccaaagagctcgtcggcagatttacaggaacttgtccccggtgtcatcccataaaggccgccgaattcttccagcagcagataaaactcgctgatgccgatgatcggaccgcccgtgacttccctcctgctagctcttctgcgcagaaacgacgcttgcaaactctccctatcgacagcgaccacagcagtgaggatgaagcccggagctatcggtacaacaagcaaagcagcctggagaccgccaacatccagccaattaaagtcagacctgctaaacttcgtttccgagccacgcctgttccggtcacgcgccgcagctcggattcgtctgactcacttctctccatcgcgcccactcctatcgcctcttgcgattccgggatcgaatcggaagcgatctcccccatctctcagtatttggatgttcgagtaccgactcgtcggctaccgctactccacttttctcccctcccacaggtagtgggtggaatcttagtaacgcctcatccggtgcaacgcatggattcttcgaacacgcctacgagcctagcgcaaatcatgtctcaatcgagagcatgatcgacccgaccctaactacaactcaaagtattccatccaaccaggaccaagtcagctgcggaaccgctcaagagcaacctgctcctatgggtgagccggcctctgagggtcttacgacccagcatgaagcattcggccatcatttcgcgtcaggtcgaccccctcataaagctctcgacatcctgttgaaggatgcccacggtaaaggcgctcgtcgttggagctagctcttcgctctgacccgtttcgagagaaccaaagacaaaatcttgcctctggaacggtcccgcttgctcgacccttcgtcatcacattctcctgaacagggcgtacgctctacggacatttctcgtcggaaatcgtatgttataatgaatttcgaaatggggatcattccgccgcagtcaattcgatagctattgccatctttcctgtacctctttcagcgctttcggcacgatttactattcatagcgcgtttcacagtgaaaccggcaggtctcggctgtttcaaacacaagcaagaggaagcttatgaaaggattgatcggcatcctttggaaggaggaactcgtttggtcacaacttgaaggggttgttttcaattccggtaatgtctcagaagcgggttcacgtataaggcggtggccctggcattcgagtaaaagtcagttcggtatcgtctcagctatacactgcgacctcatcgctgtgcgatatcacagtcgcttctaacattgagatttatagtcaaagaacgccccacacgctcgtcatgctcaatcaagccgctctctatgcgcttatcttcggtttccaggccctgtcaagcatgggccatgctctgctttattctatcaagattggaggcacagagtatcctggctattccgacacagcaggagtcggtaagccacggattgtgggcattcgctgattgaataagccgtcctcagtaaatgggcttcatttgacaggagttcctgggtctgctgatcaagaccggatagacaattgcattcagtaagtagggcttatcaacctactgcgtttcagtgttaatattttgcgtacagacgttcagtttccaatgacggttgggttcaattcgatgatccgaatgttgcgacgtacgagaccaaagctaagactgcaaagactgcacccgcgaagccaggagacgatgtcactgttacctggaccaagtggtggcgtaaagaccccaaactcgatcaccaaggtgggctgtactgccatggactccagcgatctcgaagctgacgattaaacatgatgtttacaacaggtcctatggaggtcagtcatggtcaagtcccggtagtcatagcaaattagatcgctaattcatgcgacactcaggtatacatggcaaagtgttcctccgattgtaatggagagagcgggaacgagatgcagtggttcaagactcacgaatggggttatgataacgctgctggactatgggcttcgcagaagctggcggcaagtgactcgaacgctgccatggcgaccgatctggcgtatcacatggtgcaccacacctttaagttgcctactggtctacccaaaggcaattatctcgttcgcgttaacatcatcggtgcgtaccagcccctcttaacatcttaccgcgtcgtaggctgattactctttcctcagctctgcagtccccagtgagactgtgcatgttcagcaacgcaaatctaagggctgacttttatccattaccggtccccagattctacagtactacccaagagctttccagatcagccttgatggggacgagggcaatgttccgttccctaccgggaaattcccagctatatacactgaaaactctcctaggaataaatacagcagccaattcaacatttggggtacagctgcgtgtacccctaacgacctgatgtatcaaattccaggtgtgagtagcttcaatgcctgcaggcaaaatctcaaattgacttgtcctatcgcagctcgatgtcattcccggcggcgtaaggttggtataaccttcatccgatagcacatagcgcgacctaagttccttatcatctagcgagaactccaacaatgtagcgctttgtcccgctgctgaagcaggagtcggtgctggtacgaataccggaggaggttctggaaacccagccagcagctctaccgcgggtggcaacggttcccctacgactacggccggagcgccatctggaagtagcgatgcaggtgttcttacagcgcctgatgcgagtggtgatgcgaccgccgcaaatcccgctgccgtcccctcctcgactttggacttgaaaaacaagggagtagagaccgatacaggttcttcaacacccaattccactcgtaatgatccggcaggtcaagtagcatctactgcgccttcagctggagattctggggttcctgcgtcagggtaagccacattgacatcagctacagtcccgccgtataagtatagagactgaagtgcatccctatactagtggtgatcccatagcctggactaaatgtggggaagaatgggtgcgtgatgttaatttctggcctcatataaaggacttggctgatctttaatcgtttgcccggctcagagcgcttgcattgctgcagtcactcctggcgaaagtatcgctgaatgcgaagccacggtgagtgactcgcggatccgtaatgctacgaagcataattagacaactaatatctgaacgcagaggtggacttgtactgaggctgccatgaagtctcatcgacgacgcaagttccgcaggaccaccttctgagcgtcttacagccgttccatctccctcattccatgcgtgcagcggaccagggtcgttctggccgcaatctttattatgatatgtatccttccgtttctatatctatatccgttcgacaccttcgtatcaaggctcgtcatagctcgtgcttacgaacaagcgatgcaccttcgttacaaactgcgacccagtttcacctcctccaataccttgtcgacaagtgcatgagagaagcgcgacccgcgcctgtaatgtctccttttgcttccgcgttaaccggttccattaccggatggtcccccggggcgaacgacgctttcgacctcgaccaatcgtaaagttggcgatagcaaaagatctagacaatctataactgcatcgagccagcatcccagacctgtatttgctgccatttcgctctagaattgaactcaaccagtaactcgacacgatgggcaaatttcaagcaagagccgttgccaagggtgactacgatggtattcgaaagcagatcaccgaggtactcgatcagccaggatacgatgatggtgagtcaggaacgtgaagtatcatctcgctttctcgtatagcttacattcacggtccttgatgtaggttccgctggacctgtattggtgaggtgagttcctcagagcgggcctcctctctacaaaggcagggagctgagcacgacccgattctcaggctcgcatggcacgcaagcggtactttcagcttggttgagcacaacggaggaagcgatggagccggaatgagatttggcaaggaacgtgacgaccctgccaacgccggcctcgttcacgctatcgagttcatcatgcctattcaggctgccaacccttggatctcgcacgccgatctgtggacgttggctggtgtgaccgcactcgaggcgatgaagggaccgaaagtaccatggagaccgggtcgaaccgattacgaggatgaatcgcacgcggacgaccaccggggaaacattggtgatcggctgccagacggggctttgggagcggaccacttgcgacacgtatttgggaggatgggatacagcgatcaggagatcgtggcgttgtcgggagctcacaacctcggccggtgtcatgccgatcgaagtggcttcgatgggccatgggtcgtcaaccccactcggtgagcttccatacccaacgagagtctttgcttcgaatcgaagctaaatcttatccctttgtttacagcttctccaaccagtatttcaagcttctgtcgacccggaagtggacgccgcgaaagtgggatggccccttccaatacgagacgatcgtagctggtgagagactcatgatgttgcctaccgatgtgagtattggcggcgttcacaattccgattgtgctttactgacaactgtgggcaatgaaaagatggcactcatggaagacccggaattcaaaaaatgggtgctgctctacgcaaaagaccagaagaagttcttcgaagacttcgccctagctttcggaaagctcatcgagcttggtgtcaaccgggacgattcgggtttctcccgtctggtgaacaaggccgcgagagaaggcaaaccgctcgacaaggtcggcgggggatgtccctttgcctcttcgatcaagcaaggcaagaccgagctcgacaagaacccgagggagagcaaactatagtcttttccggcgagctggtgcatctacgcgatcaagcctggtatcttgtatgagtatctgattgtatctcgtccgatagtggtcgaataatagcatattacaaaactgactcattcgttccaggccaacagacccatcacgccaaatccaaacagcatgaaagcgtactataggttcgttatgaaggtccattaggatgcgtcaggtcgaatgcgttagaccatgactaacctctttgatagtctgcttgccagaacgactttcggccaaaagttcgggaatgaccgagaccgatgcgatgtataggaatcctgcgtacccattataccgtcaacaaatgctaagagaaatgtgcggggcaacgacgtacctccagccgtgcccggaatgaccaaatcggcaggcctgacggacgtgcccaggaatcccgcggttcgtgcagcaaagacgccagctgcatctttctcccctgtacctccggcccctgcgctctctgcgatccagatacccaagaaagtgcccacgaacgctccgatagccgtgataaactgcgaggtcattgcctgtcgcttcgtgaagcccgacttgatcaggatcgaatagtcggcaatctgcaagcaagccaagctggcatcagctgagctcttcctgaatataagcaggtttataaaagctcacttcatgcgggatctcatggcagaaagtagcgaaggtcgagatcgcgcctagctgaggactggcgtagaacgatgcggccattgcctatgaatgccgagcgggatcagtgaggagctgcagttaggcgcaatgccaagctgtgaacgtaccaacccatccgtgatattgtgagctgtaacaaaggcgaccggtcagtcatacctctgggttgagggaagcccgggacttactaaagtcgccgaagaggttcaagtaagccgataacctcaagctcgcgctgacttcctgcggcttgtgttcgtcggccggcacgaccgagtcgtctgtcttctccttgtttcgttgtcttagaccttcggaggagccagcggtctctacagcagaagatttcgcttccacaggagcgtgatggtgatggtggtgatgagaatgacctccagcggatacttccccgtcagacgagttgagaaccctcatggtcttgtccaaaaagtagaatgcgaagaaaccgccgaaaatggctccctttgacatcatggtagacaaagctgttagaaaggcgaccactacacgcctctcgctgcttcacgaaccccggactcactccgataatgatgttcctcttctcctccaccatcacgtatcgtaccccatcaaccacggtcccagcgctcgtctcagactctcctgtgaacgagtgcggtatgagatgcatgcagacatctcccaacagaccaccagtagcgaaagcgatcatggtgttcaaagaggccggatcgagctcggtaggaacaagtgcgaggataaaattggggaacctgatcgaggaaagggacacggctgatcagcggggatggggaacttttcgagcgcatagaagagctcacgatgagatataaaaggttgccagcactaggaaattcgaggtgaaaggatcagtttctcgactcgacacgcagactgtccccacgatttgctcgtcgtgctcacccgaattccatctcgcgttgaaggggaagagcttggaaaaggcccattgctggaagctctcctgctgcgtcccatgcccgtggtgaccatgatgcgcagcagctccatgcacaatctttcctcctagcttcccattctgtaccagtagaaaattatgggctaagctgctagaccgatcggagctcgcatggctaagactgactgaatccgctcggtgagcgagaacaagaggaatcgcgatcaaggcgatcaaggcgatgagagctagcctgcgggtattcgaggccatggtgactaaaagtaagaggctgagtagaactgtagaattctattcgtgatcaagagagatcctgccagcatcgacttgccgttgtgtttgaggtcgatcccttgttctactttgatcagaggatcagagggtgagccagagctgcagctgagcagctgacaggatttagctcgcgtgatcgattcgaaagaaatgacgtaagaagcgagaaactctatcaaccagaatatccaacctagcttagattgaccgattgtacagtaaatcgatgacaatcatgtgacgccatttgaggaagataccacaaacgcaaacaatattaagatacacaagtgtagctatgactccgatggcaagagatcaggcctgcgcctggggcatctcggcgacagtgctcgccgggtacccttcgttctccatccagtccggctcgcatcgctgctcgagcggcgccgagggtagggggtggagagaaaccgtaggtatccgaatcggtccagtcactccttcggtgagcgcgatctcatatttggggatggactcgacgttgaagagtcgcgtcttgtattgacgcacgaccaaatcctatttggcggcgtaggacggtattttagcgggatgcaccatcgaaattcatgggcaatggcgcgaaactcacctggtcttccttgagcagctcgatgaaggcttccatctcgttgggcaagattcgaatggtcatgcagccattctcatcagccaaaagaggctattaggaatgacagtatgtcgagagggagaactcaaagtcagcccgaatcgattaatcacgcaaaatctgggtagactcaccctgatcttataagcaatgatctctccagtgaaagttacagtcctcagtggagcaaaggtaaaggtagacaaggtgttctgcgtatgagattacaaacacttgtcagagatcgtgccggaaacgggccagatgcgcatttatactgaccttgttgtggaacaagagcgctttaagctcatcgacttggtcgtgcagtcggaaagtggtggtagtgtcggacatgttggatgatgtggtctttaggattgggtatataaggtgtgagatacgatcgtgtgtgaggttgtgaaagatcgtcgagtaggggagtagcacaaattgatgtacagacgatgagccttcatacaagttggcgcagtgaagaagcgatccgaaccagcgcgggtcgactgggtcacgcgacgcgtttgataaaggagacccgctctctggggcccggtcgacctgggtttgggtgattcagttcgcaaagcttctcagacccagcccgtatcgaattcccgctctgtccaatgagctttcaaggcgcgctcggtcgaaagggtcccggttcctctattgagggcttcaaggatataaaggttgtcctgcggtagcaaacggaagactcggcggagatgtaggcgacaagagattgctagcacgacagtcatattttgagaaccagctgtaactccgtgttcagctcaactcatcctgagtatttgagcagagccgtactgctcgtcttccctttcaacccgaaaatcgcttcaaacccaccaacccgaacaacgggatcgggttctcatacacgactttagcgaccccggtcatcgatatccactcgccctcgcttattcgacggggcctccataggactccgagagatacccctggctcagaatagggggcaccggttcggcccttgcaccgcctccgtgtttccccgggcgtctcccttttcgctaagcgccaaggagaaaggaaggcgcgcccaaatcaagtgactgcaagcgatcgcgtcgacaacttccgggttgaaacacggagtagaacaagcgcgtcgaatcgctttggtgcgagacatgactcgggaaaaacagaacggcactcggccgagatccgcctttggcctgcaattgagatgctgcatctgaaaggtgtatttgactctcgatcgacatctttttctgccatgggggttaaaggaccgaatgttctgcaaggatttacaataatgaaggcctttgtcacatgctctcgtcactacagctgcctgagcccatagacgaagcccccgattccggccaagtatgacccgatgatggctgcattttccgcaaggggaatggtcagcgtcggcgcgcctgtagctcggggagatccggaacgactcacgtcctttcatagaagggaaactgtcgatcgcctgcatagggtcggggaaacccataatgttgcaaaacacgtgactcgcgatggcgggcaagactgaatctgtcgggtcgcggacgacgtgatgaggagcaggtggttgctaatgtcagcatcaaggcgattgagaacgccggttacgggcggcactgaccggtcttgacaaacagataagcggcaaaccagccaaacaaggtcgtatacgtgaattggaaacctatgatccccatgtccaagaccagccgtattcgatcagtaccctatgcgtcatacggtgcaaaatcacgctcgacattcgacttaccggccgaagccaatgccctccccgccgcgctgccggtcctgccgccctttttataaacctcccaagcgtgatgcatatgcgccagcccgaaccagcaaggtgtaccgagtaccaacgatttccagcgtgtcttctcgtcatatgcggccaggaggtaggtcgagatgatgcatgaacggaagacgatctcttcggtgatcggaccctaaaggtcgcggggggcatgattggtcaatctttgacgcggatgacctccccgggtgatggtcgatacttacgacaatataattcctcatctctacccacctcctcctctctacggccggagaaacctcttcctctgccctttcccctctgagcgcgttccatccgttcctcacgaacccgggtagggcgagtgcgaggcaatcccataccccgccgtctttgagggagaacaaccttcgaccgtacgtctgacccggccaggttttttccaacgccgaggtgaggatcgggccggtgaacaggacgggggcgaggaggtaaggaaggagaggcgggcggaggatggcgagttggatcttggagggaagggagatgaagaattcgagcatggaagagggggaaggaaggatacgggagagggtggacagggagggtaaggggtagttgggcagtggaggtagagagttgggaaggcctaggtggcgcatagtcacggatagctatgaaaacgcaaggtctctacatcactatagggatgactattgacaagagggttcagggcgaaacataccgtcgctctcagatcctgagcgttgcctcgatagtagatgatcccaccgaccaacgcgcacccaccgagggtggccaccccgacggccttgaccctgcttctgatcaccctcggatcgtccctgtccatatccaggggtacgtccgcctcgacgagatcattcaacggggtctcatctttcgacttggtcgattgagagccggtagctcgcgggcgaacggattgacgtgcgagggaaagacgggagaggtagagcccgccgacgtaagccgaggtgagggaaaaggcgacgaggtgggcttcgtttggtgacagtaatggcgaggtcgccaagagcgacgacgtgtccatgatgcggcagtactcgaacgagtgtgtcgaggatgttgcgaccagggaagagattcggtgtcgagtgtgttcagcaatgacttgacgtctaagtgatcgattgtcaaaaggtcggacggacatgaccggcatgacccgggggaacaattgtgattgattgattgctgacgacataggggaaagaccagggcgagcgtgatgacgtaatatgacggcaacttacctaatttctgcacggacatcgtagtgaatctgatttctagctttcaggctgtttctgatgtccgtgtcatcctttcaccgccccgcccctgcctccgtctttgcccgggaaagcgagatccaatcgaatcaaacacagatcagaaccatgttcaatcgtactcacgtactagatctagcacttgcaaatacacatacccatacacaggacagtagagacgccaatccgttcagaccacctttcagtcacaaaatgtcttccctcagattcaagaaccccgtcgtcagtcctagtaccccgcctagcccaacatggcgcgacccgaacacaaacgagctgacccggaccatcttgccccttgcatctccgccccttgatggtgatgcttctcatgacctatcacgacgatcgcgtgctgctggaatcctgtttggcactcgatagcgattgggccatatcactcccgagtacgtcctcccgctcgacttcgacctcgacctcgtatggctgacctgacccaccttgacacccctccttttccacattgataggaagctccgtaaattccagcctaccctggtctactggggagccggtgctgcaggagctgtcggtctcttcctctcctcggtccctatcttcaaggtacgcccccccctcttaccccttttcttcctgtgcgaaaagaatgaaagatcctggatgtcatccgagtcgacgactgatccggatcgtccttgccatgtgtctttagcacgacatcttgcacaaggtacccatcatcaacctctacttcaagggtgagtccccgtccccgtccccattcccatccccccttcccggtctggctttcgcctatccacgacgggaaccacggtagctgacccctcgatcccccttttgaccttgggaatacatacagacaacacgcccgactgtgacaagccgttctagacgatcctctcggtttagccatcatatcgaacacaaaaacgaggcgacgagttgtaggacgagacgagacgagacgagggatgggataccatattattatagactctgagaaaacggtagaccatggggaatgaggcggactgggtcggattgagaaaggccgagtcctgctacgagatgagacgagacgtaggtcaagcagttcggatcggacgggatcggattagactgctacctcgtcgcttcgatataacggagacggcgtgtatacgcgggagggaaatggcattgtgtgagagaaaagctggacggcggtctggatggtggtggcagaggaagtacactctcgtgtggcagcgcgcaatcatgggatgaaccgtccgaccacgctcagaggtgaaacgttcggcgaagccgacgtctttggcatgatcgtgtacccgtttgcgctaacacgggtcgagctggcatgtcttcccatgcaaaagtcccccgtcccgggctgattaggtgcatctcggggccgggatcaggccgagtcgaacgctatatgctacgctcgagagcgtatgcccgagtttcagctcgagacgagagattgatgtgtctgcgtttgttggaccctcgaacgaggctccacggcgctactgacccgaaagatcggcgatcagggcctcatcccgtcagcccctgcttcgccgtgtagtcctcgtcccccctggtgatctccctgctctgcaccgcgtgcggtctgggttgccaattatgcacagtctgcgaatgccggggcatgtcgacgcgaaggaacgatctcggcgagaaagggacgatgggagtggtggcggagctgtcgatggcttgagggccgatttcaatcgtcagcggagccgtcatacgcaaccaccccgatgactggatctccgaccagctgatgggtcatcatgacggtttcaccatctccttgattgggggtgatggtgctttcaacctgattagacgaacttgcaaacctttgggttacatgttgttctcaagcaagtaagtgcatctggacaacccgtgttggacatggacataatcgcttaatcagtcgaccttgacagccaacgcgcacgacaagcgcaaacgctctactctctgtccagttgcgaggcgatacgtgacgcccattcgactcgatcggataccacggagcgtaaaggggaaagagtgtcaaaaaacacagcgcaattgataaaactagaaaggaaacaaaaaaagaccatctcgaaatcacgctacgccgtgagaaagcgtcaaacaactacgactgggccatcgtcagccctcctcccgcctgccatccccgctcaacaacaacctccagcggccttctgctcgaccttctctccgaccttgagggccgactttccacccggaccagcggccatcgagcttgatcccatactgagggtcagaatgtcgaagtcagcgtctcctggttcaaggcggtgagatctggtttcaacaccacggggcgactcaccggtccttgatctgcttggacatggtcaagaaggcctgctcgacgttggtagcgttcttggccgaggtctcgaggaagggaattccgagctggtcggcgaactcctgcacgtgtcacaaacgagagggagaccgtcactcggggtcagtcatgttgccccagtgtcggtgagtccatgctcctcggactgaccttggccacggcgtgctccacgacctttttgctcgtcagatcgctcttgttaccgacgagcaacttgttgacgccctcgacggcatatcggtcaatctcctgcaaccactgcttgacgttggtaaaggtgtctacaagaccgacatacggatcagcacgtgcgaggttccgagcgaggcagcggtactatgacgaggccgatggaaagagggaggcgggagggggggactcaccattgtcggtcacgtcgtatacaacgatgattccgtgagctcctcggtagtaggacgaagtgatcgtcctgaacctctcctgacccgcagtgtcccactagaagcagcaaagggacgactcatcagccaacctcgtctactttcccctgggctctgtgccctcggcctcggcgtcgggctcttcggcgagactcacgatctgcaacttgacagtcttgccctccaactcgatcgtcctgatcttgaaatccacaccgatggtcgagatgtacgattcggtgtacgtgtcgtctgcgaaccggagcaagagacaggatttccctacgcccgagtctccgatcaagaggagctatgtgtgttaatagcgagagcgagggtgagggtgggggtggatggagggtggtcggtcagcttgatctcgtcggccgagcagggacggaagcagggggggaaggggactgaccttgaagaggtagtcgtattctgctgcgtgggacatgatgagaaatgtcgttcgaaagctattcaaacgagacgacatgtcgggtcagcgtccttggtctcggcaccctggtcaaacgaatgacgactgcgaggtcgaggtcgaagtcgagatcatgggcggggcaagcgcaggggtagaggtagaggtgtaaatcgtcggtatgcacaaagaagatcaagaaacgggcgtgattcagggtcgtcgtcttctatttccaaggctgttcagggcctggagacgacccgttggaacatcggcctcggtccggcccgagtctaaccagcaaccatagttctggtcgaaaagcccgaacggtctagtcgttcaaaaccattgtcgacgatcgctttgatgacgccgaggtctctcggaggcgaatacgcaggagcgtaggtttgtcgaaggggcatctctgtcccattcctattgtcgtgtcgtttcccttcgttcaagtcgatccgttcagacacagataagattcgcaagcatcttcacgagaagaccctgtcctttccatctcgttgtgaggctggatgctctgctcgtcgtggcctgtcggtcgtgaagaggaacccatgccacctttcgccccgcggcgaatccatcgtttgttgttgatatggtgatgaggatgatgaggtgtcgagtcttgtctttctgcctgctttgcctctttgacctctaccgactcgccaccccgacccgcaactgaatcggtcatggaatggacacttacctctgtgttcgttagactgctagttatatgtgatggaaagtcgagttgatacccttgacaaggagttggagtatggatgatgttctaactgatttgagtcgagtcgtgctgatgctgatgctgatgctgatgatgctagctagccctcagccctggctgtctctctcccctgcttgtcactcgcgcgacggggtcaatctcaatctcaatctcatcgccatcacatcgcacagccaaagcccaagccacagattcgctttctcacgcgtttgatcagctagcacgcagagtcaccagtctcgtcgcaatcaatcaattagatggtgaattaggagatgatggtcgaccaacatgaattcacttcaacttgcaacgactcgctggagtctctttcgatcatactcacacacccaacacgtcaaaatggtcagccttcaattcgcctgtcccgttcgattcgtccactaatccgccccactcgccctcacagcctaaagcagctaaatcaggtcgagcgaggctacatgacaaggccgccaagctcgccaaagctcaaaagggtcaacaagatgggacttgtacgtcggacgtgctcaatcaaggtcaggatctcgagccctttcatccgcgcttgctccaactagccgaaagaaacgggaaaaaaagaaacgctgacatggtcgtctcgactccgactcgttttcgcgcgggggcacagtcaccgaaggcgtcgccatcgcttccaactcggacgtcaagggcaagaaacgagccgtcgattccaaactccctcacccttcctcatccttcccggtccctccacccacatcttccggatccaactcgacctcgacctcgaattctgcccatccttatcaattgagcaaatcttcacggaaacgcatgaacaggaagactagggagaacctctctttagggtcgatggccgtcgtcgaggatgccctaggttcgatcttggatcccggtgcgacctcgaatacggtcgacgacgaggatgtgaacgacgatgatgaggacgatgacgatgacgacgggatgagcatggatgggtcaggtccgggcaacaagaagaagcggagaaagggcaagaaagcgaaaaaggcgcctcatcaggtagcagatggcgtcaagcccaagatcggggaaggaaagggccggacgttgaaagagaagcagagaaaggaacagatgtgagctttcaccccccacccaccccatcggcttcgaaagatccagcgactggctcttggctgaccctttatgtcgactttattagcctgtcctctagggcgcacgtccaggcggtactgcagaacccagcgttcaaggccaacccgttcgccgccatcagggaacacgctgggaacagtctcgtcatgatcgacaagcaggtcaaggcgtgaggggacatcgggtcgtcaacgtatttacttttcggggcgggggtacacctccatacatgtcgatcatacgatacaaatacgccatcattgacgatttcgcgctgggcaaagccacccgtccatcctgagcgtgaatcaggaatgcccgataatatccctgaccttgtacgccgatccgatcttttcgagatcttctttcgacaggacgacgtccaacgccttgacggcgtcgtccaagctcctcgcgttcgagatgccgacgatgggcgcggcgacgaccgggttgctcagcgtccacgcgatggccacttgggccatggtcactcccagtcgttcggccacgctctgcacggcctcgttgacggccacttcggtaggttcacggggagtctccttgtcgccccgggaggtgatccctcgttgctgcgtgtggggtcgggcgaggaatccaccggcctggaaacgcacaatctcggcgtgtcagcaggatcggttcgcacgtcggtaatgtgtacaaactcacgatcgggctccaaggtagactggacacgcccatctttttgatacaaggcatcatctccctctcctcctcgcggtacgaagcacagtaaaagttctgcatgctgataaactgaggccagttgttgcgcttggcgatggattggtactccatgaattgccatgcaaacatgctactggcgccaatgtctagggggcgagtcatgttgcatgtggttcagctttccgtgcccttgcttccactcggagacccaagattccctgactttcgactcacatcgtactttgccggactgaacgatgtccttcaacgcacacatcgtctcctcgaacggcgtgttctcgtccgcacgatggatctgcaagagatcgatgtactcgaggtcgagctctttcaacgatcgctcgaccgagtcgaagatgtgtttgcgggacaatccttgttggttcgagtagtgtcgacgttcgcgctcttcgcgagagacttggtcgaggccctgcaggcagcaagtcgagcaaaccaggtgtggtcggtcaaacgatcgcttcgaacggcaatacatggcagaactgaccttttcaaactccctggggatcaaggcgaaaagctgtattgcgcgtgtgatcagcgacgagtctgggtaagcgaggaacgttcctcgggactcgccttggtggcgacgacaatatcttctcgcggaaggttgtactgcttgatcgccttggccaagaccttgtgcgaataacctgtcggttcggaatagccactgatttagcgttcgtcccacccattccacgattaaaagtaatttcgaaagatgactgaccgttcgagtaaatgtcggcactgacgagagcggaggggcaagtcgtatcagtcaagcgcggtgagtgaatggtacgaggagtttaaataacacggtactcacgtgtcaaagaactgaatgccaacatcgtaagccgccttgatcagaggaagcgcttcatcctctacaaacgtgggcgtgattcgatcagggcgagttgcgtcggccagtgctgtcgacctgggcttaccttccaaaacccaatcgagccatttcttgcttccactatcggtgtcaagtgcgggtcgtacaggcatcgaaaatcagaggacaggatacgcaatctgggaaaccccgatccgggaggactgactaggacatcatacccaacgagatcttcgagacgcgcaacccggaaggaccgaggttgatgtactgcatcttgccttgcgcgttcttgacgacatcgtcgagattgtaagattctttcgacatggtagattgatcgtgtggctgcttagcgagggtgtagactggataaagcttgatcaggattgggagttgtcatgcagtcaagttacagggagggggtctgggtatatatgagcccggttcgatgacggctttcggcgatgaggcctccactttcgactcgttgggggccgtcaattgaccgaggtctgcccgagatctcgtacccgcgagggtgtgtgagaggaccggaaggaccgatttaattcatttgagctgaacctcggtgccagtctatggttctgagcaaggaaattctcgggcgctggtatgatacatgaagctgagagtagctagggaaatttgacggtaccgacgacaatatttcggatatcgcccagaagtgggttattcatcgcgcgatcagtagatcgcgagagaccggcacggcgttctcggtcccactgatccatctctcctcacgctcgccggatttctcgggtgactgcttgttgtacgacgccctcttaccaggtccgcttatttgcgctgtgcataccgactgcaggaaggcgatccggctagaaagtagtcaaatagctcaagaatactcgaatcagtctgctagtctgtccaaacgcgtcccattcgcgcgtcgcgtgatcgaatcgttccaatttgtgacgcggcaaaaggatgatatgatcatgttcacatctattcggcccaacattcgtcttgctaccaggtctatatcgttcaacagcttcaaagcctctccttgtatcagatccaagtttgcgttctcataagcatgcggatacaaatagaaatcgacccgtccgtcatcaaacgaccgttgcctccagcttcggccccaccgctcatccagattgggggagagatggtgattatggaactccagggagacttgacatttgaaggagagccaggcggcaaggttatcggactactaggcttagaacggatggttcgttatctacctggatctggctaaataccatgatgggaccgctcgggctgactcggtcgaactggatgtgtgggcaggataaaccgacgttgcacctagggaaacatcatcttctgcatggcaagatcgtcaacctcccacgcccgctcgccgtcatccgtcgagccgactctcgggatgcttccacgtccaagccgtcaacccgcacagaacagccgaatggatcgggtacgagggaagacgaggatgcacccgagttggaattggaaactcaaccgggtccttctgccaaacgttcccgtccgaaccctggacgacgaccaacgactactactactactacgacgacgacgacgacgacgacgactacgatatcttcaaaccctatcgaccctttccagaccttgctgcgcagcccgtcgcggacgacgacgaccttgcctgccccagcttcttcttccccacccggaccctcgacgaagggtaagaacagggattactcgtccgacctctcttctcccgttcaaccgtttatcggacgggcgagcaagcggaaaacaggacggatgggggacggcctcagcacggtattggagagggaacctgtcgaacctggagaggtcgatgtcgatgctatagcggcgggcgatacggccatggatggtcaggtggatctagctggacggacagacaaggacgaggagagcggtacggtggataggacgagagagtataaggtcgtcggtgtcgtccgcaaaaaggtcgtctttgcgctccggtgagcatgaagagacgcctatgtctttgcttagcaggtcgagcgtttcgcgatgctgatttaagttttgaaacagacccgaaccgatcgtcacggccacgatcttgccagagtagggcacagacccgtttccggtcgttgggatcgacgacaggagccgttcgggtcgatcgctacctttccgacccctcgaccggttgagcagcttgggcagtgtctaacaaacactctctgcatgaggtggagagagtgatctcgggacctgttcacggtatataaacttagtcgttaagatcaagactcgagagcttcgactagagtcctctctcgaacaacactcctccgtgtttctcgggctgtaacatctcccgtcagggatagtcatcagaatttcttatacccagcattcgatcgattgctcataaaggtctcgatgacgctgggggactcttctcttcgactgctgttggaccgtctcgtgtagcttgcagcttggagagggactacactgccatgagttgacgttatttgggtggtctcggaagtagttacgcgttaactttggcgctaaggacggctgggaatctcgagaaacgcgttcgtttgagcagcgagcaaggtgtagcgaggggggtaaggaaggggggaccgacttttgatggatgaagggggtcagaagtgtctggttgatcggacatgatcatggtcgcaacgatactcgggaccatcagacttggcatatatccatagtctagtagttcgccagtagaccggaatattcgtagtacctcaaggaatagacatcgctcgttcggtgcatcgcgagacgtgtgccccccatctccccacgctgggctattgtcctttgaaagaggtcagaacacgagagacataatcacctccgtggacaaaagatcaggcgggcgtctaacccctaggtgcgaagacgattcaaaagtcagaagcagtcaacattcatcagctggtttgcaccataacgtgaatcgaaagctgcgacgacatttctagctcgagggtgaccggccagaaagggaattcgacgaggcttttcctcttgccgacctgtccgtgctcccgaaaggaccctcaccaaagcctgtcgagatcaggaaaggagcctttgctggtgcaacagtctcgcacgggatcaccctttgtcgctaggtcgctctcgatctccagagtctcaacgatcaaaacgtcggctcgccagagtcggtcgacgcatcaacgctcgagtttgggagtcagccgaccgatatcgattggtcctggcagcttccctctggtgtcgaagaggaaccctgattaggcgacaagcttcgtctggtctcctacgagcttcttgcgagcacaaagtagagaaagggatacctctgcgccaatctgcccacaaccatgtcggacggaacagctcgaccacgaccacctcgacaaagctcgagggcaggtgctggttcgagtagacagagggaaagtagttatggaacgaggataccgagtggacctgtgggactgcatgtgagcccgagactgagaggtcaaacacccgtacggacgtcgaggctgatggtcgtttcgtctgatcgatctataggctccggtttcactaggtgccgagttgcaacctcgtggtcaaccttcattgagagcaccctcgcctggtccatctcagcactcgtcacggtcggtttcccccgtaccacccgaagccagcgggctgccgtacctcgccaacgctggaccgacgaccaacgccttgctcaaaggtcgtcagacggcgcttcctcctcctcttccgagtcctccgaccgtctccgagagatcgatgagcgggaacggaccgctgaatccattacgacaacgacctaccccccctagaccgccccatcagcctttaccgcccctgccggtcttgccttcacatcatcaacaggtcgtcaagacacatcagcaccagccaatccatcagcaacagcaacaacgacaaccttcctcgcactcggtacagcatactagccagaacggtccgggagagactccgatcaggcggtccgcgaccggatcgactacggcgtcgaacggctcggggaatggaaagttcaatagcccacctccgccgcctgctccacctccgagagacgtgcccttgcctcccttgccgaccactataccaggaatcacgcactcgggctcgtccaagagtgctcacttggtcggagctagcagtactgggagcttgaggcaggaggaacgggccgccagagagtatgggagtttgggcgtcaagagtcggagcggggcgatcaaggatgaggcttatcaaatgagacaggcgtcgctgcctactcgcatgggggcagcatccagatctcatgcggattcagacatctctcttggaggcgttgatcaagaggcacctcggtcgcaacagcagaggagtgccagcggggatgtattgggaaccgagcggccaaggaaatcgtccatggatgccgcacggatgatggattccgctaatgagacgagaggccgaaagagctcgatggatgctgtgcagacgatgaacacgcggccgcctgtcccacggacgagaacgccagagccagtcgccaaggtgaacctggcgcccgaggccgatgacggttacgaagcgcggcaagcggaatcgtacggtcgagcaaggggatcaatggagatggataggcaagtacaggcggaatcgtcaagacaggcgcaactgaggggattaggactcgcagcggtgggtccgcctcagcaaactcggacgaagccgcccagcccgccccagccccagcaatcgagggctacttcctccagcaactctcctgcaacgagaaagagcggggaacaggacaggaacgtcttgcccggtcagtcaccgcagctgaacgggtcctggccgtcatcgacgggaaagaaatggagcatctccccgttggtacagatgatggatgatgggttctcgaagcgacaggattactcgtcgctgaacggcaggcgatcggaagatccaggcaccttgatgggacggggtacacctatgcaagaggcaacgaaacctgctgttcaaccccgcaagagctcgggtggattgcgagggttgtttagtcggaacaagaaggacaaggcggtcaagaaccctacgccggcacctcaacctgcaccggccgactttgcgccaccaatggcacctagacggcgcgccagcgaggacatgctgcgatccaagcgacaacatgacgaaacgtctacactccctgcgagaaagacggcgacccctgaaccgggaatcttcgtgcggcgagtgaccgagccgatgcaacaaagacagccaccagaatcgatctcgcgtgaagaacggcatgtgtcgccgtcttccggaggtctggatcgcgagtccagtgtccagagcccgggatccagcaagacgctcgattctgcagagagcaacaccacgattcgagaagccgcagctctcccccctgtcttgtctttaccgcttccgcaactgccgaaactggatttcagcttcggatccactttcgatagcatgttcaagtcgctcgacggtaaagtctccccagcagagatctcggcaaatccactacattcccgtcgtcgatcaagaagcttcagcgagttctccaagccggtgatctcccctcctttgggcccctccgtttcgcatctgccgagcgttgagagtaacgccagtctggtcgccgatctgatggcatacagtcagttggagactgtcaagaacctggagaactcggaaccgaccgttccttcgctgtcgtctgaccatggaagaaccacatcatcggcttcctcacaaatcatgggcaattctcctcctcgaacgcccggttcagccgaaactgcgcaagtcaacattgccggctcgggcagctcgtgctctatcgacggtttgcacacttcgggttcggtcgactctgccgacctggcggtcgtaggcaaagcttggacaaatacggtacccgacaagtcgcaaaagacggtccggccgagactgctccagctcgcagaaaccaactcgtcttctgcgacaatcgtcgagcaggatgagagcggatcagaggccggcaagtcggcactctctcccccacagaccgccaaactcgagccatcattggatattgtgaaacccatcaccgtgcaggaccggccggcacagcctcaagtcgtcagcaaaatccgaaagattcctcttcgacgccgagcacggccattgagctcaaaagtcgataatatgtcgctcgctgacaatttgcgaaggatcttgaatacgtgagcatggccaagcctacgttttggtactgaatgctgatgcgcgtgtgacagatttcgcctcggagcgtcggtgcggaatattgataaagctggtctactccgcaatgagctcttggagaccttggtcgagggcgagaagcgaggttacaatgggtcggacaaggctggaaacgcagctgtgcggacagtctgtgtcgaatggtacgcatccatattatcaactcctgcgttcgcaacaccccagcttacgaccccatcaacgtagggtgaatatcatattggaagagttgcagaaagaacaagctgccaacgagcggggggcgtgtctcgaggcgctgtctgctatcatggagaggtgagtctcttgtgtaacgtgcatattcatcgtgtctgactgatctttttgctggacaagttcgacaatgtcaatgaaagctctcaagggtcagcaaggtgacgagctcattttccgcgtcttgatggttcggataatgtcttatgtgctcggaaagctctcgagcaagggaatcttccacaacacgcttctcttttctggacgaatgttagcctttgcattctttagaatcgagggtatcgctttccagctgctggcagcgcttccgacaagacctatcgtcctggtgcggttcgcacatgcagccaaggaatacgcattcgacagcggcaaaggccttgacattgcgtatccgccgcatctccaacccctgcaattcgacaatgcacgggattacatggaccgtgtcaactcccacgtcccagattatttcgaggttgaagaggatgaagctttccactttgacaagtctggcaactggcttcgacgatggcagtcggatgattcagaactgtttccttccttttacaaagcatatcaccggaacctagcagtttatctagcagatgccgtagaaatggctgaaggcgacgagacaacgataccggccgcggtccttatgcgagcgcccggttatgcccatcttgcggctgtttttgctaccaagacgcatagctatatcgtcggggcggtcaatgccgtcacgacaacctcgaccacgtcaaatttcaacgcagacgagtccgctggtcttcgtggcaacgccaaaccgccggttctggagaccgcaaatcgtcgtctcaccgagatcatcctgaacatggccaactcgagaatcttcgttcaaactcggtcgggtcgaatgatggagtgcgatggagccgagctgtgggcaagcatgatcgacgtttgggtcaagtacctcgtatcacggaccagcctttactctccacggggggtattctgcctattcgatctgttggacggtttcgtggctccatcctacgatccactcgcctcgccaacagcggctggacaacccactttcaaggcatctcttgtcgacattccacacctcatatcggtgctcaggctcgtcctgactgagaccgaccatcaccttacgctggccaagtgtgtggcctttatctggacacacttcgagacgctgtgcgcgcaagccgagcatcgagaagcgctctgcatgaatctgttgctcgaccctaggattttcgaacggcttgtcctattctggtcacagagcgtgagaagttatatcttacggctggtcgtcttcagactgggtcacgtagcgaccgcgccgaccgatctcgacaaccacgagatggagtttgcgaccgtacaaatggttcatacgaggcttgagcggatacgccgtcggcacgatgagctcgagcctcgggatcatatggtcacgcctcctgcgcagactatgcagttggatccgcttgacgaggccagcggattgccaaggagcaaatcgactatcaccatggtcgagccggtcgaccgctcagaagaatctactccagcgacgcgcgccgaaaggcttttgggtctcgcaggtgtggagtcgcccaacatgaatacggaaacagccgagccagagtacatcacgggcaaggttaagggagccaaagcctcgagctggttcaagaagccgtttggcaagcagaagaaacgcaaacccagcaccgagagcgagagcgagagcgattcgagtgtcaagccggccaagattactggacaatccttccagcctcctatcggccgtccctcgcacctcaagacctcgatggacacccaggatgcacagccgacttcgccggcggccatgtcgcaaagatcggttggtgcagagagtgtagactcgttcgaaggggacgcttctgcacttcagccacgcggccctgtcgtgccgaccatatcaacaacccctgcactgcggttcagcacccccgaaccccctgcatcaccccgatcgacgagactacgcttatgaccttcgcacccttcgagtattgcttctactcgccccttatcgactccacttgaccgataagaccctggagcaccccatagaaccatctgcagccatacagatccttcgtgactctgtcctcaacgtttatcgacaaacaacggacgtcaaatccctacgatcatcggaacgtcaacgacctacgactccagttatttacatccgcgctcggcatctgcttccgcagtcgagattcgattccgcgtagttcgcccgatcgacccgcccttaacaggaggaaagcaaggtcctgattgtcccccccaacggcgagtctgaaaccgattaggtgctccaaatatcgtttttgtttcgctcgtccggctcacacagaccgacaaccgcagtgtcatcatttgtctcgtcttgacctaccgtgccatcgaatattacaattgacggggaacatcagtcggccgactccgcgaggagcatggtatgtatgcgccaatcgattagttcaccgaagcgtgacgtatatacgacagcctgaaaccgttaattgagagctagtgatacgaaacgaatctgcaatgacacttcgacacaatttgagactctgcaccaagcaataagaagcgagtgactatcgattgcgtttcagcatattgcgcttctcgatgacctatgcctgtccgttgattggctgcgattacgcgtcgcgttctcagcctcactcgtcatttccctccctcccgcccccggcgatgtgcgatgcgatgcgtcgcgatgtcgagcgcaaccgtatcccagatcgtggatcggggtagaggccaggatcggaacgctgctccgggacctatacaaaggacgagacctctgcgaatcaagctcaccgaccgccgatcactgcgtcctacccgtagcttaaatatccacgtacactctctagctctacgtgaagcaacatcgtatgctcattcagagattcctcaaacccgctagtctcctacgctcgacctacgcaacatcgcttcattccccggccgcatcgctacctcgttacttttcccatactcacagaaatctgaacaagatgtctaacgaagaaaaggccctcactctccccgtcctggacgaatccgagctcaaggatggcgagatgaagcaggtcgaattcggcgaaggcgagaacaagggcaaggtcctgctcgtcaaggttggcggcaaggtcgtgagttccattcgactcgttctgagtggttatgccttacttcgctgatagcccaatgattgcatatggtcagtatgccaattccggagtctgcacgcattacggcgcacctcttgccagtatgtcatgtcgctgtttatttttagccgtctcgacactcacaagcttgtcttttggttctgttcagagggagttctcgacagcgtaagttgcatgtgaaaatggccggctttgcgcagaagcttattgctttgtgtttccacatgctctctagaccggtcgaatcacatgtccctggcacggagcctgcttcaacgcctgcaccggtgatgttgaggatgctcctggccttgacggcttgcacacgtacggcacagaagtcagggacggaaagatcttcgtcaccgccaacttgaagaccgttaccagcaagatgggacgttcgcctatcgctcgtgccaaggtcaagaagaaccgaccggcttcgagtgatcagcccaagagctccatctcgccccctgaccatgagaccaaggacgaaaaggtcgtcgtcgtcggaggtggttccgccggtctccataccgtcgaggcgctccgagagcatggatttgagggatcgatcactttgatctccaaggagaaatacgcgccgttcgacaggaccaagttgtccaaggcgctcattatcgacgccggaaagctcgcttggaggtcagaggaagagcttaagggagacttcaaggtggacctgcagctcggaaccgaggtcaccaagatcgacagacagaacaagaccgtagagaccagcaagggtgacaaggtacagtacgacaagctcgtattggctcccggaagcgtcaccaggaagctgcccatcgacggagttgacctcgaaaacatctttactttgaggggtctcgaggacactcagggcatcgttgccggtatgtcacgaaatttgggagtagctgatccggcgaagctgactgcatgacttcatacctctcctagccatcaacgagaacactagggtcgccatcatcggaacttcctttatcggtcttgagctcgccggctccatcatgaagaagggccccaagagcgtcgacgtcatcggtatggataaggtgcccttcgagaagatcttgggagcagatattggaaaggccatccagaaggttcgtcttgtcatacagtcgaacatgcgccacatcgagctaaacagaatggctgctctcgtagaacttggaagagcagggcatcaaattccacatggaggtcggtgtagacaagatcttgcctagcggtcagtcttgatcacctgatagcgctagaaacttcagctcacgctcgtatcgctacagagtccgactcgaagaaggtcggtgccgtagcactcaaggacgccgacaacattcctgccgatctcctcattctcggagtcggtgtcgctcctgccaccaagttcctcgaggctagcggattcaagttggagaaagaccagggtatcaccgtcgaccagtaccttcgagtcgagggggaggaagacgtcttcgcgatcggtgacattgcccactacaagcagtacccccacaaggacgcccgacgagtcgagcactggaacgtcgccggaaaccacgtaagttgaaatttccccatatgtctcgcctgcgcttagctgatttggtatcgattgctggagtagggacgagcggttgccgagagcatcatctcgcccagcaaactgaagccatacagcaaaggttagacttacgaatcgcccgtctagcttctggacacggctgactcgatcaaattaaaacgttcccacagtacccatcttctggtcttcggcgggcggtggtcttcgttacgtgagcgatgccaatggctttgacgatgtgcacattgacggcgacttgtccaaggagctcaaggtatgtgcaacccgatgtagacacgtcacggggagtgaggctgacagcacacgtttcaattacagttcgtggcctactacgcacaaggcgacgacgtgagtctgcctgcggcagcatgagatgccctgagaacggacagctgaccgagattcttgaactttctagatcgtcgcggttgcctccattaagagcgatccttacgtctccaaggcggccgaattgatcaggctcaagcaaatgcctactttctccgagatcaagggtggaaagaacatcttggatattgacatctccggaaagagtggtaattagaaacgcttttcccccttgttgtgatacggaccccacgctgtacttgtacgatggaatacgtgaagctgattcatcgcggtgaatcatgtaggttcagggcgggacggccggtcgagacgtcggaatttactgctgagctcgatgactgagttcttcacttcgaggctgtaggtagatgtcgcttttgtctgcaacctcaacgaccacgatcgttcacgacgagcactccgagtacatccgagagtgattttgtttccgatcccatttccatcttgcttccgcgcgagatttcagtcgatccgagcgttcaaggaggtagaggttgtcttcaggtgccgtctaaacgttgtaaagtattcgtacaacggttctacagaagataccgctaccactgttgagatataccctgaatcaggtagactggcctcaagacttgctagaacgacgatagtccaaaccgccggcaagatgaagcacgaagcaactccggccttcgccggcaagtgggcgaatatgaaccctgccttgaccccttgggtgtaagtgacttcagcggctcataacagaccattcaaactgagacctctccctcctgattcccttagtctagatactatccacaacacattcaacttcgagtctctgacacctattcaggcttcgcttattcctctcgccatcacaaagaacaaggactttcttatcgaggcgatcaccggttcgggaaagacgctgtcctatgtcgtccctatcctcgaacgactgatcaagagggaatctacactagcattggaaagaagtagcgcaacggaagctcctgaaggcggtcttcggaagggattgaagaagaacgaggttttcgccatggtcatcgtgcccacgcgagagctggccgttcaggtgtgggaggtcttcgagatcttcttcgaggctctgcggaaagctgcggtggcggaaatgaaggagtcgaatactaaaatcgaaggagaggaagtcgaggaaggtcttgccggaacggccgccgagcaacagacgatcatcgaggccacctatccatcgcctcttctgcttgtctccggtcaaactcagtcccggtcaacaacgacaaaccctcccccagctcccatcatcatctctactccaggtcgcctcgcatcgtacttgagcagtatgacatcttcaagtagcagtgcctcgacctccgcctacgcccgagcgaggagagcgctatctctggatcagttcgaagtcctcacccttgatgaggcggacggcttgctctctagccgggatcacttgaagaatctcgaagtcatctggaaggcactccctcgccaacgtcgaaattggcttttcagcgcgacaatgatggacctgttatccgagcggaacgcaaatggtcaggtcggactaggagctctcggtggcggagcaggactagaactggcagggctacggaatttgactcgggtggtcgtcagggtggaggccaaagtcaagaagagaaaggcaggagatggcggagaggaagaggaagagacatcgagaaagaagggcacagggaaggaagagcgaaggacaccccttatgtgagcgcgagaccgcagaatgggagacgaatgccgcactaaagcgatcgaattccggaccaacaggctgcagaacacatatctgacttgtcatcaagcggagaagacgttgcaacttatccggctactccttaagcaaactcgagaggacgagtctgccaagttcatcgtctactttgctacatgcgcggccgttgattacttttacaacgtaagtttcacaagggtgccacgcgtaatcaataagattaccgggactgattgcttgccaatcataggttctcaaacggctgccatctctctccaagttccatctttgttcacttcacggtcatctccagcccaacattcgaacaaacaccctcgcatcgtttacgacccatccttcgctttcgacaagtcctgccgtcttgctctgtaccgacgttgcggcaaggggtcttgatcttcccgatgttgacgtcgtgattcagtacgatccgccaagcgatcccaagagctttagtcatcgcgctggtcgaacggcccggatgggcaggcgggggaaagccgtcgtcctgctggccaagggttgtgaggaggagtatatcggtgagtacaggaacagaaatccagtcttgaccaggcgttcagtatgttgatgcagatcccgtctacagaatttttgaagctgcgaaagatcccacttacgaaacagcgctacatcttggataacgaaccgtcgggcgaatcgaacgaggatgcaaaagcttcacgtgacacagtggacaagaaggcgttggacctgttggagcagatgcgggacatcgtgatcaaggatagagctcttaacgacaaggtcagtgcaccttctcagcatgcgaggcgcgcgaaacctgacttcctttggctgtatccaggccgcaaaagccttcgtatcaaccgtacgagcttactcgaagcatgaagcgtcttatattttccgcctcaaatcgcttgacatgtttggcatgggcgtcagctatggactgctgcgactgccgaaaatgcccgaagtcaaagagtggcgagagcgcgtgaagaagcaaaaggagacgaaagaagcggacacggactcgcaggcgcccactgatttgacgtggatggaccgggaggtcgatgtgagttgagcttcgcgttgatgacgctctgtattgctatacgagaatactcaaccaacctgttctccgcattcagtgggatagcttcggctatctagacaaagctcgagaggttcaccgccaacaggagatggtgatcgcagccgaaaagcgcgaagagaccaacgctcagcgacggaaagaagcggagctgaggcacaccaatgccaagaagttcgaggcttggtctcagaaggtcgaggcgaaggagaggaaattgctacggcgggagaagaaggacaggaagaaggactgggaggccaaggaagagaagcgtatgctagaggaaggcggagggttggcaggaacacctcgagctgctttacacaagaacaagcaggaagaaaagccgttggccaagccccttatcgaaacgaagccgtcagtcgagtcggatacagggtcgtctcaaccttccggagcggaggaggacagcgatcttgaggaggattataaggaggtaaaaaatgaccggatcaaaagaaaccgccccacgggaggtctgatcggtggcggaatcttcgacgatatgatgtgataacttctggcgatctcctttcttgggatcgctttctgggaatgatagtcacttcggctgcagatcttgtccgctgacagttccgcattgggcactagatatgtagatctgtatgtatattgacgctgctgacaccgattacaagatcgcagtctctccgcatgactgtccgatgtacatcagcatcggcaaagggtgctcactgtaagtttggctgaatggagacaacggacccttattcgtcgcagcccgacgtaatcttctagccggttcttccgctttgcatcatggtggaacagccagcttacgaacttggcactacttgagaccgtactaggctctctccactgaaccagagatgcacatatactaatgaccgggctgttatcacaacatcgcccactttttcctcatcttgttgagccgttgtgaggtcaataatgctccatacgtacccttgtcccccggacctgaaggacgaggtcgatattttggatctccatagctgacgccaggcgctccctacggagcgaacctattgacaaagaatgctctgcaagggagctcaggccatacccaccgcgtacaccaatcgtgccgtctcgatccacctctcccaaccgtgtgaccgcaggcgtcggtccggtcatcgagacgatgaacacccggctggtcgcaagggacagtcggggcacggtcttgcctgctcaccacgcgagtcgcagccagaacgaggtcaccaaggacgtcgccgacaaggattgcgacgaggagtccgatggcttggacgacgagtctgacggcttggacgatgggtccgatggctttgaggatgggtccgacgaagaggacgaccagcccatcgttcgggcgttccgacctcaattccccgactacttcgacgtcgagacgggtcgaacacatcgggtgccaacttgttccaggtggggcttacctcctcaggcccaggggacctcataggacttcctccccaaccagtcgatctcccctaagatcacgcgctctttgagcaagtgttccaagggtttattggaacggtccgcaccacggacaagggggacattcgatggctggacatatcgaccccgtcgcagttggcttacgtctcttccgtagcttgtgtctgtagcacaaactgacaaggcttggtatcttttcacagatgtttcatcaagttgcccaacttcgcctcgcaccttcgagtgcttcagatgaccgaggaatcagcgcgataccacctcccatcgtgtcctacgatggctgtgatatggttcgtgatgaacacctttcctttctggtcagggcctcgacacgactgtctcatatacgtctgggctgacatggaccatcccgggtgcgacccctcctgcgaagaggttgcgaccgacgtcgagttcggtgacgaggacaagtccccgccgactcgggccaaccaaggatgtcttgccggcactcgaccgagatgatgaaggcgcagactgtctccgaagggttccttgacaaactcgacttggagctcagccaggagctgtcagcaatcgagatggacaagatgggcatggctccaagctgcaacaaccttggacgagccacgatgggcagcctgccggccagaatgcaaatgttgagataatgggtctatcggcttttgtacaatttgtattgttcgagaatcagctgtcaagaagattgtatctgttaagctgcgaatgtaatcagtacgactggtctgagcaacttacctcgttcgcgaccaaggtgatgacctagacgtaagggttatgcgttagatctcgattgcgtttgcgtttgccaatctattttacctacggtgtggggggcgattcgcaggaagtgtgctgtggtacccttgtaccatccaaggaacccttccgtcttcaaagtcttccacagacagtcgaaggggttcgaatagagcgctcctcgtatccgtcctttagcatccgtgtaggtcggttctgatgtattgcaagtaaggtcaatcagagacatgttgtgtggtgtctcagaacaacagctcacggttgtatactcttgtaagagcctatcagacacggcaggtgagcggtcgcacagctctctcatgccgtcttgaacttacggtatcggccggccttgaagtggagtcaccagagaggtatattagtgagcgtcccttgcgtacccacagccctcacttactgcatcatcatgcactatcgtagacaaggcacagatcaggtccggaaagcggatcggtttccgtgaagcgcgaagccaagactcaccacacagataccagagaacgagctgctgacgaggtacgtccagtaactactttcactcatcaaaccactcgacaccagttttgatttcgcgtagttgtaagaaggaagttgtacactcgaaccctgcacgaatcggggtcagcaatcagctcgcggaccggacagcagtattcagcttcaaactcgcttaccatggccgtcctcaacatagcacttcctacacctcgactgagacccatccaaccctccttcttaacgacactgctcaaagcgtgaatcgaattgcggtaggcgtgctgagtgccgatcggcaacgcgggagagtacgcttgcatccttgccttgatcaagaagagagggtttccgagggtagctaagcagaagaagttctcgtgtcagtcatgatgcgcacagcggattctcttcccaaagcactcacctccgatcattccgctgatggaaccggctgatactgcgctccagaagacggcttgcttggcatcattaccagcgaagacgttgagcttttgtcggatcggctcgtagaatccgagacgggatccattgagtagcacctgagcggggtcgaaagtcaggggatacgattgagactacgtgaagtatgttgaacttacttggtaggcgtactacaaggcacacagagaccggtaaggagtcaactcaaacggacgaagctcatggggaagaatacgtacggctggcacaagaccccgctgcagtcccttgattccctcattcctccacgtcttcttgaacacgtcgaaaacatttgcgtagacctttggtgcgtccgaagtcttcatgagctctccctgcaattgaagccgggtcttcatgacttcgggaatattggctgtacgacggttgagattcaaccacagtcatgaatcgtgggtaatgacccgtaatcttcaggaccgtgttcgcttacagacagttactgctgcacatcctgctagacctccgcacagaaacgtctcgcccaaactcaactgtgttagtgggatcgctggcttgccgggggcagctggaactgctaaagttgccatggcagtggagaccttgcgactgtctcgtgtgatcgtgtgacgaatgtcgctagagtagtgtcgttgccaaatactgaaatgatgcggtcggtagtgacgtctagttcaaaaggtacctcaacccattcccgacggtcgaaagcagagatgcattcggccgaaagccgataaacgcgcgaatttgacgcttgagactatcatgtatccatgtccaaatccatgcatctcgaacgggtcgactgattcgacgccgatatatgaacaaacgtacaacaatagattgaaggagactgtcaagactgatgtaccgcggaattctcgtcttcacagccgacccaatcggccatatagactacctaaagtcccggtgcgaggggctggggcgttcgcctttctcccgagaccgacctggtttcccttgttcccgacgatcttgagctcgaggtcagcggcagctttgagatcagcgacagctccaacgtcaccgcgcatgacccagtgcttttgctggtgactgtaaaagaaaggggagctgttcttcaaataaaagaacagcgccaatagttccacgtcaccgccgagcagccggtgcgcctcacgctgggtcagcgtcatcacgaaattgagcaaccgacggttactcttgagataaccgctggacgttgcaacgatgattgtcgacaatgacagtcagttggagagaaaatcaaaggtgcagcatagaggaacaagacttacatcagctcggcgggcgagaactcgtccagccacttccttccaccccagtgaatgaccttcgggctgaggaacatgcccatggcctgctcgaacgtgtcctgacctcagggcacctcaatcggacgctccggtaagccgttgcggaccctaatagcgacgaccagccggttgtcgcccaagggaggcacctcggggaaactgatatagtccggaagccggacgtgatgctcgtccggcaacatcgccggctgcggtcctggctcgtcgcgcctggactcggggaggggtcggtcctgcctttgaaatgcccagggagggacaataccgaccggaggaacgatcggagcgactgctggtcccggcaccgagctgaccttcgaagcgaccttgatgatcgagaggtgcgggccgacctgcggggcgtcgcggatcacgaacggagacccgtcattgaccttgacgagcttggcgaccttgacgacctcgacgaaggggcagtcttgatcgagcagaggtcgtttgaccgggcccgttttgttctccttgtcatctcctgcgtgagccaaccgcttcttcgcgtgtcgtacggagggctcgaggaagagcaagtccgcggtccgctttgccttagcctgagcgggcattcggctgacgtgaggtccgcgaagccgaaggggagtctttggggtctacaggtagcaggtcagctcaattctgcaatttagcgtgttgacatggtgcgtacgctgttgtatgagggcattgtcgaccgagagtctggactgggtttagggatggtggagattgggtatccgagcataaagtgaggtatccgatagggaataataggtttccgattatgggtgaaagcttagctgagatagcttaaaagtccgaggtatccaagtccgagaaaggtgttagaagagaagtttaggatgaaggtccgggctggagacttacggtagcttagaaatggtctataatagtgggaaacgagtgtgatagcgtccaaatgacgcctaataggagatgatggagatttggtggtgatttgaaaaagggagatgctgttgaaaccgtttcattcgaggtcaaggtgtgatatggtgatgtgttgatgtggaccgacttgattgttgtgatgcgctggagcgagtcccggtaggcaagcaagcgagcgagacccaccggatggaaggattttcgcgtgttctggttggctgctgatcatcgctgggggcggaaagaaggggaaaaaacgcgcttgacgtaatctcagacgatcatgtcttgatggacgattctctcggatatgttcatcatcgtcaaaccacaatcgtatcgtcagatgccgcaatgacatccgcagtcttgtgaagcttgatggcggctcttcaggcatgtgagcgaaccgatccagccttgtcaatttgccggaagatattgtcttgcgatttcttccgcgatcaaagtatatcgagactgcgcttctgcatatgccagcgacaaagttgcatcaatctccagcgctttaggtaaccatggtagaccttgctgatccgcttctgtttcccgaaaaaggctggctagaaagcgcctagatcaaccgcaagatccttagctgtgtgggcccgcccatcctcatgtcgaactgcctgggtattgattctgcatgactactgcgatagtccatcgcaatttcatgtgtccgtaacctctttgctcatcttgacccatcgttagaaactctctgaccagcttcttctgcaatttcccttttcgtagcctggcattcaacatacgtgccattaaaaccgaccttcgtggtccagcggcgagatcctgaagctgatatcagtctcttgatccatccgtcatggcgctttcggaaggcagcagagtccaggcgtattgagtggatacctcctgagtctaagcaattcgagccgtcttcagtgcctcggtaacgaccactctcctttccgggttcgtcttgcactccccgattcgtctcatctcgtatgtcggtcagtaacatttgcccaaggtatttcgcatcgtcatcttcgcatccggaatcagaaaccctactccttcagtcgcagcgtagttgagataggggtaacgtatctagatgctgatgccggtgaagacgatgctgaaagagttcttcagtgggaaggcatcgaccatgtctcgattgcaaaatctgcgccttgcacgaaaggcaatcatcggaagaagctgatgcactgatctttacgatccttgccatgatgtcaatgaatcgagcacccgacgggccaggccgcagagaagggtgattgtatacagggaccgcgtggtacaatcagcgtgagaggggtgacgcatccttttctcaggcgcgctcgaacttcccatttgaccgtcactcggcctggcctgagttgggttgctgactgcaacttatatatactcgtaccatcatccttggaacattgattgctcttccctctaatcataaagtaacgcctgtctgaaatagctcaaaatcgcgtgaatagtcaggcattttctcacgggaagtagccgcatgatcgtattggtgctccatcactagcatggtgacgccaataacaggctgtccaccctgcgcagacccaaaatgtcttgctttcaagtcgtatccaaggacaacaattaggcgcaattattatctgcttcgagaagaaccccggacatctcgttgggatgtactaagctggttcgctagtctgagtgatccatgaaggtcgatccagataccggatgatgaggctctttatgaacgatggtcatcctcaaggaccaggacgaatacaagcttatgaaccggtccagcatcacgggcaaacggaaatagatttcacttccagcgattcccctgaagacaaacgtgatattggccgtgtcgactttggtgtccaggaaatgcgccccgataattacaagattacgttcttcaagcagcgagcctcatacctggctcggtcttggtgtaagcggtcgagcgattcgatcatgggtatccttaggatgccccgtgattgtttcgaaagtccatccgccgagcgtgggtcaaggcggccggatacagcccgatcctgatccatcaaatcatcactccgggaggatccacgggccggacagaaaatggcaaagaaaggcatgtgcgcctaagagaccatcaaagagcagagattgtcgtgatcgccgtccgaagacaatcaaaagaacatcgcatcagcttatatccaccgcaagcccttgcccttctatggaccgagacaagatccaccctatcgctgcagaggatgcgactatcctttgagtaattgagtaagtagtaatacgtcgcaaattcagaaaccaggccaggctcgccttgatctggacgccatcagtatcgggcttacttccttgcacccgacgccggaatttgaaatcgctcgactgggcgacgcgaaaatttacatgagaacactctggagcgccctgcctctcgcttctccctggtgacccaagaagttttttatctttccagaatcttctattccgcggtcctgactgcccagaacggtctatatatatcggtccgcgcgtcccccattcccctcttttcctcgctctcaaagctcttctctttcctcacggaagtcgaaaagggtggagagaaccgggactctcggaaaactcagccccggaactgctcgcagtcttgaagaccattgaagggaagtctttcgccatgcctgcgagcggtttaccttaatcttcgaccgagcagcgcataagcgttccttcccttccagtgtctagccaacactgtcagccccgatcgtcatcacgcagctgctcggcgtcaagcacgaagatcaaagccatacaaaaaggagcggtagtgagtatctcggtcttctcgattgtgccttgccctaactcgcttcggactggacaagatgcacggcttcggcctctgacctgttatcccatgtgtcattgacggtcggggtgaggttgcaatgttctcattggttgttcgtgacgtccgtatctgacgtacggattcaatcacttattataataagacgttatgcacataaatcggcgtacatttgtgttctcacgctaaaggtggagcccctcggggagagccattgtcgaaaccgggccaagcagccggtacgcgcacaccagagcaggccgtgcagcatcgtcggcacgatgcatgtctgtgaatcttcctttctgctccttctgcacatcacttcacatatccttctttctttcgtcgtgtctcttcaagagctgcctccgaactatcgaaacaaaaggtgcgccccatgcttgacccgagatcatcgaaacggctgacttccgcatcacaggtactgactcggatactcctaggcgtaagttctgaattgcctttccgtccggtacaatgacaacggctaacggcctgcttttctcttattttatcctcaggggcggaggggcgacggcgatgcccctccgcttcctcctccccccggtcacaagacataagacgtgcagaacagattggaagacgccgaccgacaatcggcagtcgctttccactttgcagctagactctttctacgatagatgcatatcataaacatattatgaatatatttcaacgttgttttcgggtttcttgaacttggtcgttctcgaaccagttcaccgggtcgatgggaatgagtggaataggaaccagctacaggcaggctaaaagataattctttcgttaccaacgactaaggaccggtgatacctctcaatcttttcttctgagcgtgactctcttcgctgccctttcgcttgcgactcggcccgccttcatcttcgtctcggtccgtgtcatgttcgtctccatcgctgatagctctgtcgttttgaagttctctggtcttactcccttcaatgccgttcttgatctctctgggctcctgcctcttgtccgcgactccgtcagctcctctcttccccggttccgtgtcctgagcggcagccgacgtggcgttgttggcagatctggcatctctttccatcttgtccttccggccccaggcggcgttcatttgcctatggacgacttgcatgatcttcacgcagtacttctcttgtttcaagctggagtttgctgggagtcagccaagctatctgtaccgtttccgtatccgactgacctgattttgataggtttctggcttttgacacgatccgcgagggtggggtcatgatgaaagatgaaagcggagagaaaggggtagtccgtgacgatgctcatgtgctgaggtgagacgatgttgccgagcgcgaagaactcttcctctttgagacgcttgtcgaatctggttttgatttctcccgtctgccatctggaaacgaaagtgtcagccttagtcgagaaggaattcagcttcagcggaacaaggggatagtgtctcgattcgtgacgcattcgatgaccaatctcaaccaagccttcgtcatgaccttggctcaacatcgtcagggggagatgtactcaccgtttcacgtcaagagctttctcttcctcggggatcatgccgccggtggcttcttgcaccgcctcccttgtgtattccttctgctacctgactttcttctcgttgacgttaacaagatgctgagctaaaacatcctcatagatatagaagacgtgacgagtatccttgagctaacgaggggtaaagtggtgaggccgggggaggatcgaattgacccaggcttggtagccggtcacttgcttgtggacgatcgcaggagggttgcgttcaagcacgggttgggcttgaaagtagtgctcgatgtcatccctctcgtgtttgtgaatggtctaaatgagtacgcaaggatatcagacaaagagcttagttcaggccagcctcagtcgatgtaccgctccaatagccatcgcgtcattatgctctatcgagatatacgtccaaggtgtcaaaggatggtacgctcagtgggtgcatcttcgttcttaccttccacaccacgtctggacctctctctttcctcgtacatatcacgtccccatcgctgagaatttgtgatcatggtgtttgatggtactcgctatggagtgtcacacttgcccagtactgcgttcgtcgagaatgatgtggggaaggtcactcgcttggcgtgcaagggtatgtcgctggtcacgggatgaacagggtggcagagctctggaaacactctggtgctctctgagcctctagtttgtctgccacaacagtccaacccgtgccctgttaggtgtgcctcgattcctattcaagggaagaagggacgatggtatgagtattacgccaagttatcgcgttccaagccataggcagctgcttgacaggcgcgaaattcatgggaaaagtaaatacacatcatgcggagatgaggagcataaatgataacatcacgtgtgcacaagaaaacggaaagtcaaaaaggaactctctgcctgggaatcgaacccagcgcgggcgcgagtagtgttgatagttgatatcatgacaagcgccaatgttaccaatacaccagcaaagatgctcgtgatgacgacatgctgatgcgcaatgtactcgaacacattccggcttcgcatgtttgtggtctctttccgcttacctttgttggcggacggtcattattcacagttgaatgctgaaagacaaccccacttgtagagtcacgcaatcagcaagcacttctgttgccgactcaccctgcatgtaaatcaagcgttctgacctttttggcaaagccaagctggaccagaacgggaacaaaggcaggacttgaaccccgtatcccgcttgataaatatggaggatctcagaaacggcgtgccaacagatgatccacgcatggctcggtggccacaatgcacccttctaaaccgagcgtatcccctcgatgtctcgcctacaagtgcctcatccgaaccatgtcataggccttatcagcaatggggggcatttcgcataacgcacatggagcttgaatacaaagtagggaagagagaactacttgtgtaagcccgacgaaccatttgacgagcctgcctgttcttcccttcgtccacgcgaccgacttcgagaggctgtctgctgcactgctagacgcctcatcgatgaagccaaatcgtctccggcttccatcacgctcgtaaggccatgcccgccacttcccgatgttggaggtgtgtcgtatgcggatcttggtcgacgaggtaccgagggcgcccggctcgagccttgagaactggctctcgacccgagccggtccacactaggtggtttaggttcccggcttcgatcgcgactgcgatcaacgctaggtggacgcagatcacgaccgcgactgatgctccttgtttcgctgtggggagaaacgctgagggtactttcgtcccgctgattgacgctcctggctcgactgcggcttctgcttctcgacttgacatgctgccagccctgcagagcatctgagcttgcgagctgcttgatcgtccatcgtttacgcttgtctccttccaggcaaccaagcaggcattctaaccattcggaacccaggtgtccaggaacaacccaatctccgcgtaagatcttcatctgcaagcgcgggtcgaacgtgtccacgaaaggaagacgcgaggtgagcagggcgtgcaagatgatcccaagtgcccaaatatcttgggccaatgagggaccgctgggaggtgccgacaagatttctggtggagcatacggtagcgaagccgaagggaatgccttgttcgaaggtaccttttcaccccaacggccgcccggcgacggggaatgacgggcgttaatgcgacggccatcgacgaatccagactgtgtatggtgtggctggtgttgatgcggatgtccgtgatcctggccgaaaggattcatctgtctgtatctcgatctggacctagagccggcggcacgtgaacgctctctagaagctggtctgctctcgattatcacgcgcttcccctcagacctccctcgtccgcgctcttcgtcttccttgttgcctgagtccttcgctgaaccgagtttctgagcgagtccgaaatcgcacacgcagatgctcccatcttgtccgacgagaaagttgtccagcttcaagtctccgtgcaacatgccaccctcttcaaaaccttcataaccttcatgtaaagcttgcacggccgcgactacaccaggaaaccactttcgagccgtctcctcgcttcccccgtcccgcctgacgacgtccagcagcgaccctcccgccatgtacggagaaatcagatacgtagcatatccatccgggtctctataagtctccaagaggggcaagatccgggggtgccgtggaaggctcttccatagctcaagctcgagttcgaaattttcgagcgaacccgaggtatcgctgagatcgtcccgcttgacaatcttgcacgagaacatttcgccggtctcgtccagcgttgcctgcctgacagtggagaatccgcctcgcccgataatcttgcccagcgtgtagccgagcacctttgcgcccttggcatcgggggcggacgatgtagtagagacgttgctggacatctcttccgctgccatccgagtggccgtctggttgagtgagaacgatcggtaaggcgagatcgaacgaccatgggcgaatcctccacccgatccgtgtgagggcgtgaatctcgcagggtaacctagctgatcctgaggcgagacgctgaggttcctctctgtgcttctctcattggacgactgccgagccaccttcccgacactgctctcgccgatcttgcctccccatccgacctcactcttcatgctcgttcctcttctcaaaccggtcccagcagccgacaaggtaggggacgaaaagttggacaaaaaggccgaggcgggtgagaacggttctcccccgcgactattgttcaccgcactcggttcgtcgccctcacggacgcccgacaaggcttccatgagcgaagtctcgctaatcttggtattcctcgtcggagtggcggtcattgccgagttgccctggttctcgctgattcctgcccacctcgacgcccagaaagaggtatgcccttcgttgatgggcgagatgacggagggccccgcttgaatctgatctctgctaggtgaaacgggcatgccagatggacctggcaaatcttccatctcgcttggtgcggacgtggagaggaggtgcatctgggcgggagggctggacgtgtagctgttcgaggccgatgcggcgtggtacgagaacaacgggtgggatgtgatatgatccgggatcgcattcgtcacgttcctattggtcggcgaagtgggtagagaccacggaacatcgtgtccggcttgttcgctgaagggagacctcaagtcgggctcagactcgtgatcctgctcggttgagccgtggcctagccagtcgctcgcgctcatcaacctggtcatcctaacgggaggctcgggtttccacctatcttcgtcctcgacgatctctttgcctcctccgaatgcatggtggtccagcccgaaggctcctgggtgatgctgatggtggtccatggcagaggacgagaagcggttcgacgagtacgaggaagatgccggtcccgaaggaatcggaatcgaaggcaggttggagacggggatgggtcctgacatgttgaatacctggagatcttggtttcgcctttgagacaattttcaagtatgtaaagcgagtcctggagatcttccgttcgcgaaagaattccgctcttgctgagcctctgccttgttccgttcttcacactgcgaggttagttgggtaatgatgatccgcttgctataccagctatcttcgatttgagaactccggtatgttttcactagaggcaaagacatcatgttcagcctacgaccgagaccgaacatacggttggagaccaaaaaccgaccttgtaaacgttaaagccctgtccccgtcttcaatttacggcgtctgggtgtggttgcgtcaggtctattcgagatattagatcgaggcagttgtacgatgtgcgagagcaagaagcggcgaatctctcgatgtcgctggctgataaagggatacgaccgagtctatagctgaggcataccacgagatgagcgaaagatgaatggctgagaagggggaaggtccccccgagatgaaaggtggaaatacagaaaacacatcggcacggaaagaggatctaccggaggaaatcgcggatcagtctcgacggtatggaaggtttggatcaaatgtcattgttttttctaaattgcacaggcttgatgcatgatgaagcgtatctggccatgcatggttccttgaagtctgagtcgaggacgtgatagtgaccttaacatggttgtttcaatccacggttgtcaaacttttcttgcggtcgtctcgcatccgaagcgaaccgttcggggttggccgacctgatgattgaaggtggaaacaagacaaccccggctgatccgctaaaaccggtccagagaagcggggggcaccacatgggtcggggatgatcgaccgggaccgaggattcaacacgtcaacatgacttgggtaacgatctactgagctgactgatcgccatgacgaatcgaccataccaggcttgttgcagatgaagagggactcaactcctagaccaagaactacagtcgcttgacagtccagccctcagatccgcgttcagtcggaaatatctgtactcgaatagacgatagagcaacacaatgtccgacacgactccccagcgttacaagttccgcatcgagcctctcgacggtagctcaaaggatgacatgctcgaggcaggccgactcgccgataccgcttttgacagcgacaccagtcaattctccatgacatacctcaggcaaccttacccgggcgccgaatctcgaatccaaggcgtagctaaacgtctggctgacggactcggcaagggaaaagtcgcctggaaagccgtacgcgacgaacctggtcatgaaaaggacggagagatggccggattcagtatctggcagcctcccggtgtcggattcaccatcttcgacacgacggacagggaacgattgacggacgagcagcaggatctgtatgagaacgtcgatctggaagggtggaacagacttttcggggccatgcaagagtctcgaaaaaccttgcacggggacacggatcactggtatgtcgcgagacgtcctcggatccccatttaatcaacagcctacgaccgctgacacaactctatattcgtcttcgtaggtacctcgagatcctcgccatccacccgtcttaccaacgacaaggtctcggccagctcttgctcaaggaccgactcccacaactccctgccgaccaggctgtgcagctcgagagtaccccggccggtcaaggtctatacacccggttcgggttcgaggtcgtccacaagatacacgtgatgggacgggacaagatgatggatatcccggtcatggtcaagaagccgaccgatgttgcgtgatcacttgtacaaacgattagagacgatacgtgagagaatgtatacaaatggtcgaagaagatccacgaaaggaacaaaggctccatggctacagaccgttggggctgtagatgtagctgacggcggtgacgaacgactcggtcgactccgcgcattctcgccggcaggctgcccattgtggctcgtccgaagttgttatgagccgtgcccatcttgtccatctcgattgctgacagctcccggctcagctccaactcgacgaagctacggcgcgtctcttgatgtcaagtgcggtccgtcgtatgcgccggtcaaggaatacttctctgcaaacctgtcgggttgaggttaaccgggagttgacggcgatcgccgattcgaccctcgacctctcgaatcgcgaaaagtgattccaccctaacttcaaatctgatcgatctgatcaccgatgggctgcattgactgacgggtcgcatcagtatctaagagctgaagttcctatgatgtccgtcaagcttgtctgagcattcgcaactcggatctatcctatcattgcccggcacgccattcctgatcgcccaagcgagctcgacacaggtgcttaggcagatcgcctcgacagctaaatgtctaaacttgctaccacccacctcggtacatccttcgagactcactgctcgcaccttcttcggcaatcgctcgggatgtctctgtctcgaataggcgggaaaggtgatggcggagtggaccttcgcggatggtggtaccttccccgagctcgacccggaccccgacctgggacgaatcacgaggcagatcgaccgcgaggaagggttgcacacaacgaaggacttgccttgaaaccgggaatggatggacatgatacttcaggacggaggctcagagtgctcgtacagtgcaaagccgaaaagatcaaggccggcccgcgattgatcagggagatggaagggatcgctcgacgggggttcgacctgctccgaaatcaaccttcggacccgatacccgacagcccttataatatacccgaagaaacgagatcggtttcagacgacttgcagaccttggatacgatcacgaccgtcatctgtactcggtcagggttttcaccgagtgcaacgttggaagcggtccggagccgcgttccgatgctgctcctgcacgtccctttcgagatcgacgaggcgatgcgattgattgcgtggcagcaacgtcagcaagaacttacagaggaagagcaaggaggagaggactacccaatacctagcatcctgcgggcggctttttcgaatccagcgttagcggggacgagcggggtattgggggaagacctagagttaagaaaggagtacgcggagggaaccgctcgagcggaggagtcgtttggaatgggtctttggtggagatgagacggggttgtagattctcaggcgtacgaggaagctgcctagatcttctcgaggataggttagcgtcgtaacatgagcttcaacccattgcatttgcataaaagtactacactcgtccgacgttgccagtactatcgtgcccattgcgcgttcactggcccgactttgagagctacagacagcaacggagctctaagtgcagtatagaaccgctcatcttagccatccacgatctcaaggccaacccgacgattatacagctgccagtcatgcagtcatcaactcgttgcacctttgaacagctagagaatccgacgaatctccttatcttttgcagccgagttgcttccgacccaatcttacgagacctccactttttcgttcccgatagccccggtcatcgttattcttggaccgccataggttggccattcggttggatacaggatgtcagctgttagctactggccgcgtagtccaacttgtaccacgaataaattggtcgtgaaacgagataagtgctctggagagctctcatagttgagctagcttgtacgatccgcgaggaacgcagagagccgacgatcggtttaccttgcaaccaaactttgaatcgtcagcaggacactcgcaacgacaatgctcgacagggtcactcaaccgcttcgggctgtgtaccggaagttcccatcgaattactcgaagaaggtgccatttgaagcctttgcgatcgtgatcttcttggtcttcatgaatgtggtcgtgtgggctgtgtgtctgggacttctggtatgtcgtcagcccggcgtctcctcaaacggaacaatggagctgatcacgaagaggccttgcagcataatcacacgtaggtctagactttcaagccaatcaagacgtatgactgaagttgatggaagatttgcagggagatgtacgcgacagccgttcttgcctggtcgcttggactgcggcatgccctggatgcggaccacatctcggtgagctcattgcctaatatagatcacaactatgatcacggctaagaacgaatgcttatctaggcaatcgatctgatgacgagacgtctgatcgcttcggggcagagaccggtgaccgtggggactttcttcagcttgggccattcgacgtgagtgtgacaaaacagtagagttccctatcctgttgatctgcgctgatagcgaaaactctgcgccgtggggtagcatcgtcattgtgacctcgctagtcactgctgcgaccgccgcccatcttgcgacccaattcgatcgcttctccgagatcggcaacatcatcggcacctcagtctccgcctcgtttctgatccttctcgggatcatgaatgcttggatcttgttcaagctgattcaaggtttacgagcctggataaggggtgaagtcggggataaaggcgaagaattgtgggagaaaaggggcggaggtccgatgtggtggattttgaaaaagctgttcaggctcatcgacaagtgagttcaagagcgggacctgcattcggaatctgactcgaatcatctgcacgtagaccatggaagatgtacccgcttggcgtagtcttcggtctcggattcgatacatcttccgagatcgccctccttgggctcgcctccctgcaagccagcaagggaacttcgatctggttgatcctttgcttccccatcctgttcacagttgggatgtgccttttggacacgttggacggtgcatcgatgctcatcatctatacttggtgtgacgacgaggtcgaggaggacaaacaattactaaggcgagatgaggtggacgaaattgagacagcgcgtccgcggttattaccaaacggcgaaaccgttgaagaggaagacgtccagaaaggaaagatcgacatacttggttcagagaccccaggcgaggagcacgcggtgcccacgctcgaagtcggatcagtggctattcaacctaaacgtcagggcaactcgacgcttcacaacccgctcattttcctctactattcgaccctgctcacggcacttaccgtgctcgtagcgctcatcattgggacggtccagcttttctctctgctgcagaacgtcattaaaccagaaccacagggtaaattctgggacgcggtgacggcgctcagcgatcattacgatatcgttgggggatcgattgcgggaggttttgtcctggtcggcatcttgggagtcttcgcttggccccatttcaagcgatggatcgaggaaaagaagagggtgtatgagggacgaggtaaggggatctcgctgggttcagattcggaggaaggaacagcagaaggcgcgacagtgtgatccgggttaggggtaaaatacatagatgccgataaatatgcatatccttcacgtcgaggctcagcacaaacataaagataccgaacgtgtgtgaaataagtcaacccttgcagcccgctatattgtatttgatccttaacccctcatgatgatctctgagcaaggtctgtctaaagtgccccgactagttccctcccagcttttgactccgcgtaggccctgctcggaagcaaaaatggatcggcagccggcgggtgatcgaggtgacgacaccccgtttcgaggtactgaagaggtgcggaacagagatcacagacgtgattcttgtggtatgccaaaatccagaccacgctcgtagaataccgatagctgtaaatacaactagatatggcatacctgttttctggactgatcgaatggctgaaaggattgctttggcagaagaagctggaggtcagttgatatcgatcgcctttgagtacaatctccttattgatcgcccccttcatacggtcgtcgacaggtcacgatcgtgggactacaagccagtggaaagactaggtgagctgacaggtcttactgccgtatcctctgccaccataatatagagctgaccttgtccatcaccctcgccttggaactccgcagtctcacaaacgtattagctgccaatcagttcagttcggatgtagtacccaccgtggcattcaacctgaagcaggtcaagaaagggaacgtgaacatgaagatctgggacctgggtgtgagtggacgtccagtccagccggagatgctatcgataggacgccgaccaagtccgcgagctgatgacattcacgttatggcttgatagggtcaacccaagttcaggaatatgtgggaccggtatgcaagaggagctgatgctatagtttacgtggtggatgctgccgacgtgagtattaataatgaatgttgcccagtctgtcaatccctctcatctcgctgatcgaatgctgttactccttctttccacccgtagagagcaacggtacccactgcagccagcgagttgcattccctcttggcagtccaagctctggctggagtacctctgctagtactggcgaacaagaatgatctgccagaagctatgggcgtggacgagatgatctcggcgatgggattggagaggatccgagatcgggcggtcagcgtgagtgaagatgccctttccactttttaagcgcagattagtactggttcggttccaagtgactgacattgagcgtcattcctgctttatcttgctatagtgctactcgacgtcgaacaagaccaagcacaacctcgacctcctgatctcctggttgactcaacgagctcactagagcccgctagtccaacctccatcaccattaccaccaccattaccttctctcgtcctggtctcgtttcctctgttggtgtcggctcgaagctctttgtttggcaagacgcccatatctagccatccagcaaacgctagctctgatcttgtcagcatcctcaaactggcgtgctttgagccgctcttgcctttccacttcttatcgcaaagtcttgtatacgctatgctatgccactcggttctgatttataaagctccatcgagtatcgccgagaaccgtttgccctgttcgttccctcaatccatgaacgacgacgaatcgaccattgcccaatctcggccgaagccggggtccccgcggcaatcgataatctcgtattcccctttcaaagagaaacgaggatgacttgcttcgatgattgaatgttctgcagtctcggatcgcacgccagcagagaccatcgataaacagcagtaaggaggcgaacggaccagctcatagcagtagtaggcatacgagttgttctgacctctcagtgacagaatggtaggcctcacctttcttgggaactcacaccttgcttgctaatgctaacatccctcgcctcgtctgcctcaaacagtttcgggtctcgcagggtcgatgtaacggacttagcagccatacgactgttcgatatatcaacaagggcctcagacggttgaccaccacaaccgtccttcgtaaagatggcttcatggcgggagatggcgtatgggttaagagcccacgagatgtgagataccgtccatcaacctcaattcaaccgtagctaaacgagcatccacacagatctcgaaccatcttgacaagtacatcgtcggtcaagataaggccaagaagactctttctgtggcggtcttcaatcattatcaccgaatcgtgcattcgagggaacaggctcaagcgttcagagatcggcttgacaaagagcaagctacagtcgagcaagaagaggccagaaactcggctgctcagaacaaaccaatcatagagacggaggattccagcaactcagccgtgccgaagacgaagcggagcaaggagcccaccggggaacgaagagagttccgaatcgaaagccggatagttgagccagatcctaccaagacacacgaaccgtcgacatggacaggcgagtcatagttcatgcatgtaatccttctgattggcttacacccctcctctacttccctggtaggtcgaaatttctatactccaacctttccattgaatcagtcagcgatagacaacgagtcagccgtccggaaaccgtcgacgctgctcggccgcctatccggagcgttcgtgcagagcgtctctagcgaccgagatcatggcagcgcccaggcctccggatcgagttcggccggagcagaaggcaagaccgataccggtgagcaggatcaagggcaattcgctttcgaggatgtagaggacgacatagatttggagaagagcaacgtcttgatgctgtaagtcaacgacatgcgcgatgtagactggcagctgatcacttagataatgcacagcggtcctactggatctggaaagactctgctcgcacgtactcttgctcggattttagatgtgccatttgcttcctccgatgccacaagctttacgcaagctggttatgttggtgaggatgtcgagagtgccgtcggacggcttttgaagaatgcagaatgggatgttggtcgaacagagtgagtcgcgccgagcaagctatgggtcgtgttaaccgctgactgtggcaggattacaggattggcatcattcacattgacgaggttgataagctagcgagacggggcggaagtggagaaggcgcaagttggggcggcagggatgtgggcggtgagggagttcaacaaggtgagtcgtatctagcttcttcccgtggaaacgacatctcatccggggccatcctgttcatttttattagctttactcaagctcttagaaggaacgtcgttgacattacaagcgaaacctccaccacaaaccgcaatgccacctccttcgactcctcctctcaacggcacgatgtcctcaacaacgcatccattgagcgagggttcatcaggaggtggtaagggacttggcgctgcctcggctgattggcccggcaagaagggtatcagagagggtctgcctcagcacggtggtggcgggggcgtcggatcgtcaggaggtatgtacaagaagagacaatttgctacggaccacgctgacgcaatcacctcttttaggtagcaaaggggaaacttttacagttgacacgcaagttccgctcccgggtctttcaagcaactcagaactgatgaatggtcgcggtgaacagtacgaatattctgttcatcctatctggagcattcgtaggtctggagcagatcatcgctcgacgtagcaacaaaggggtacgtaggataggtctggcgctcgtcaggcgatcgatcacagttagctaaaaatacacgtgttggtgttcagtccatcggtttcaacgccgttctcaccgatccgacccctgcaccaggctccgaagctttggagatcgatgacgcgatgactgccaataaagacacagcacacaaagacaaattggccggtctgacgagtcacgatctcgtcgaatacgggttcattcccgagtaggtcttagctcgtcctccagtcggcggtctgctcacgctcacatctttacctaaacagattcgttgggagagtgccagtcctagcaccgctgcatcccttgtcgctgtctgacctaatgcgaattctcgtcgagccaaagaacgctatcattaagcaacagcggaaactgttctcccgttgggaatgcgaactgcaattctctgactctgcgcttcgagctatcgcgaaggaggcactccgccgaggtgggagtgctcggcatctaaagagcgtgatctctgagctcctacttgacgccaattttgaatcacctggttcggtaagcaaaagtatttcaatatccacttgacaggggctgataattcatcgtcacgcgaaacagtctgtgcggtatgctgctgtaacacaggctgtagtacgcaaggaaaccccggttctgtacttctctcgcggccaaaaatcccttttcaatcgcgcactcgccgatgatgacacgcctaagccaagtcaaagcgaaaccaccgaggtggatgctgctaacggccaggctcgtactttcgctccaatcgaggtagaactggacgtggatcctgagcctgctcgagcgttcggccattcgacgaggcccttcaaagctcaacgttcgccttcaattagccatgtccacaaaagattgctgcactcctcttgccaccgcatgcagcagcagaatcagaagaaccgccagcagcggacgcctccggggaaacccaagtccaacgccaaatctgccaagaggcggcaagccattgcatcgcaggacctccgttcgagtcgatccgatactcgaagcccggttatgcagtgtatcgcttactctactgccgagcgttacgacctcatagccatagctaaggagctcaaccgacaagaggtaccgtttaccttggcattcgagcaagaacgaaccgatcaggccatcgtagtttccggttggaacttcggtctgggggctggagctgatgcccgtacggaggaggcaatcagcctggcgaaacttgctgaggaaggggcgaaaaggggcgaatctaccgcaaacaacgatggttctgcattctcgatcagcggcccgctctcagaccagagcccaacctacgaacaaggcaaagaaggcgagatttggatcttcaagtcgggaagcttcgtcacttggggcatgtcgaacgcagaggggaaaactttcattcgcgaagttgtccggaacaagaaggcgagaattgaagttggcccgatcaattacctcgacattcagacagaggaggtagactatgttaccgatccaagcgagtaagtcgaatgggcttcattgaaaaagaggtgaagcaccagctaaattaatgaattcatatagagaaacgaggatcaagggcaacctgatcttgctcggtcggccccccgttttgcactccttccagcagtcccctacatacgcctcattcctcacccggtatacgttctccgtcgcgctcgcccggtcgtctgctctggcgctggtcgaagcgaagctcaacgcgcacctggagagcgtcggaaaagttcctgggcttctcgagtctactggaacacagcctttgaagaggaaggaggttatccgaaagatcggagagcttatggtactcagagaggcggtcaacttccgtggcggcgggttggaggataccccagaggtaggcatgactgcattcgtcccgtaattgtctgctgactcgtattttcttttccaatgtcagatttattggtctgagccgcagctagaatgtacgtttggaagggctgtatgcgcttcggtcgtggtctgacgagagtgtttgtcacagcctatttcgacgcggtgtcgagcgaattcgagatggaagaccgtatcgaaaccatcaaccagaaaattgattatgccagtgaagtgcaaagtacgctacgggctctgcttaccgaggtaagcattcgataattgtgttccactatgaggaaaggctgagtccagactgttttagggttccgctcatcgtatggaagtcatcattatcgcactgatcgctgtcgaagtcgtcttggtgggtaaaccctagatcgctggaatgcaaataagatcgacgctgactcagcccgggttggcgtctataggccctgattcgtgaaggtcccgagttgttgcacagtttgacgaatctcctgaccggttttgatcttgtgagattacctgatcggcattgtctacttgcgtcagcagagtattaaacgcagacttgctattccaggtcagcaagcaattcgccttccccactgccatcgcggccttgtcttcctgttcggccagtagcaaatctttgccttcgcggaatccactaccgatcgcgtatcacgtgctgcaacgacctttgccttaccaagttgggttggagttgcagaatgccattatacaggctcggcttcaggcgaagaaggaagatccgtctagcgatctagccctacaggatgtgatcctcttactcggtaagtttgcacaggtcttttgactcatctcgatgtgtatcgaccgtctacacccacagagcatttgccgacatacacgacagggcgacgtgacgctatggtcggagatctacatcccgaggagcagaaaattcaaaatgtcggtgcagagtttcatgttaccaaacgcggcggacaagtcacctaccacggacctggtcaattagtcggatacccattgattgatttgcagcgatctgaggtgagcattatgcatattctgttctgcccagcaatcgtacttagggtaattcgtctcaggtctcgacacgatgctacgtatcgtatttgcaagatatcctggcatcatatgctcgcgaacgtcacagcctcgaggttcttgctcctcacccaaatgatcatgtcggagtctttgctaacgccaatgagaaggttagtccagtatgccatctcggcggtaccatcagctgagctgaaattcttgcgccaagaagttagcttccatcggaatccatatgcggcatcgattcacttcgcacggcttttctatcaacgtgaccgatcagcctctccactggttcgatttggtcaccgcttgcggactgaatgacgtgcgagccacatcaattcagaagatgctgctagattcgaacggtgccactgttagatcagtggcggaggaactcatgccgtacttctcaaggaaatttggccgcgatgttgtaccgctagcatcgttgagtgggatgaacgccggagcggaaaccatcgccaaccttatacagcaagccgagaagcaggctggagcagcgagtctggaaaaaggagacacatggcccgagcgcccgcttattgcggcttccacgcgatgacatgttctggcgcaaaactaatagacaaccgaatgacgaacacgtacacttttcaccgacatacaggctcgtgttgtagactatgcgccaattgtacgaaatacaaactgcattgctcttgtcccgtcccggcttcttttctttccttgggcgagtcgtttcaagtgtcgctctgcttgccactttcaatcccgaacttgattcgggcttgccagaggctctgcatattcctgacctgcagcatcgcccttgaaccgaaataagtaataggtctcgacgaagtgcccaaaaatcgacttacgagcgtagcaaatccctcttcacataccacgctggcgacgacgttttcgagatcttcggcagcaagcgagtacagtcctgacttggatcggatttcggttacgatagcttcagggtcgacggtattgtcgggaatcttgccgagctggttggctgggaacgacatggctaactgggtgtcttcagggtcgggcaagggagttcgtcgcttcatcctgatggatggtgcgtccaggtcgatcaatggtcgatcaaaagggtctggcgtctcttcggtctggaatctcttgctgcgtttggccgagggggattcgtcagggtattgtctagccggatgggctcttgggctggacatcggatgcaaaggccattgattatgggtagacgtctcgggctgagtgcaggattcttggtgcgcctcggcttcctcaaaggagcgtttctgtggagacgaatagaggtcttcttgattgtcgatagtgccccgtgcgatgatcctgctagagtttcggtggctatcgaacctgaaatccggggtctggtatcgatgaggtttgggacctccgcgaagcgacatggctggtgtcataagtcgagaagacgagtcttgtgaatatagagtgtgatcaggtggtggtcgaagaaacaagcctctgcgcggagggttgggctcccgctgttttgaaggtgtgctgtgaatcggctgtcggtctggataatagctgaaatcgttctcgaggtccggataacgtggactggcatatgcgaggtgagaagcgggttgggccctatactgagaaggtggaggcggtttcttgaatccttgtgtgtcgatcgacggtgtcatcatagtgttctccgggtcctaaaacagtcagagaatcaagtagaccaaataaggctaggtcgcgatcggacgtttctgactggatgaacataccggcagatggtcgaacctcgtttcatccaacgtcccacccatttgagactctgtaagcagccctcctcctccgctgaccgtacgtccttgctcatcgcgcaatgaccgattactcgactgagtcaactctttctgcttcttctggtatttcccaccgtccatcgcagggcaaaactctttgagggtatcaacgatcttttgagcgtccgtctcgttggccgttcggacttgcacccgactgtaggtctatgtgaagaccaggagtagcttgtcagttagaacggtttatgagtcgcgtgggatagtgggaccgacttgttctgtgctggtggtagaggacattatagtgtgacttaattgggatagaggggatagagctcttggtatgccgtcacggtatcagcaaagatgtgttgaggcgaaagtaaaggtccggtgcctacttgatgagcagcccgttggatactagtttgtatccaaggatgggctgagcgactttgctgtggctccattgtttggcgtattctaccacgtcgagtaggtactaccggaaatccagactcaggctgtgtcatgatgatttccgcaaggatatcgaccatcgatcaggtctcacatgtcgggtcgacccgctccagatcgagatcttgcacagagctctgttccgagcagtcatacccagtacttgactttgatcttcatcgttctcttggaagggtcgaagcgtctcgatccgtagcatcaatcgatctgtagggctatcaaggctgggcaggagcatcagcccaagtcgatatccatccagcctgctcgcgaagtgacacgatgcagcttactaatggttccatttgaagtcgttagtactcgcagtgaaacccagagccaagctggcaggtatggataatttgtgaagcggaactgcaggtgtattgatattggcaacgagcgtcagttacggaggctgatcggcgacccgtttcacttgcgttcgaccgtgctgagcccgcgcacgcgaagtggttgagccatcacgaggcgagagacgagacccgttctgtatgattagcgtgacatatgacactcctcgatgatctcttgatagaccggaagggatgtaagtgacattgaaccgatcaaaggaccttgtcgtcaatcgatcagcccttttgatggatatcacctgaatgactttcacgtgacgccgtgtttggagtactttgccagatttgcttccgctgattggggatgaaacatgcctcgtgcaagatcgttcgagtcttagcgaaagccatgttttttttatcccttaaaggcgatcaaattttcagatgaagttgcccataaaacaggatcttggtccccttgttatgccatcgatacccgcagcacatgacgcctaacgaaccgccggcttgcgccttggcatcgtataaaaagaagattcgcatgttgccatcgaagggctcctctgctgccgtcttagcactgaaggttttccaattcccttcctcccatcggcttttcaagacttgagacggagtagtgaccaaagtcgtgaaaggaagcgcaaacgacctctgtgaccagcaggttctggtcagacggataaagagggcaagtaacgcggttcgaacgccaaattgctactcagtcaagtagtctttcgggacagcgcaactagctagatattcctttcagcgagggttgtttcggatgatgaacgacagagacaaatttcaatcagtacggaccgctgttttaacctttctaggcaaacaggaccccctcgcgagtccgtcagacgaggaggaatcgcttgacgagcatggcaagaggatcgtagacctctacaacgtagtcatttagatgactcggaaggagttgatcacgcaaccgactccttttttccaagacgccatgaagattgggaagacaaagacggacgatgtgtatggcccggaagaagccaaaaattggcaccgccgtatcgacgagcttgtgacggaagcctggcttagccggaacatctgcttactcgcgggtacgctcatcaagtatgtcggaagtcaagctgaagaacatcaaagaatcgtatggcgatctttagaagtggtgagagaggccctccacagtggttcgattgcggcgactcatcgactggtgcagagacatcgacaaggcgtcagaggagtaccagcgctcgaactggaggcttgacggtgagaattcgagcctcgacgaacttctcaaagtcgttaagcgatacagctgggcagattttgtgaatcgaaggtatgatacggtagcagacgactcaacgtcgtcgggttcatacgtcttggctagtactgagaatcaagactcattcgtcaaaacactcgcggctggggtcagcaaccttgacttgagccacctcgaagaaatcctgtctattgttcagctgcgagtatcgtcttcaagtaacgcacagaacactgcagaaacctcgtcacagccggttcccccgaatctcatgagtttgtgaggtcacgctgagaccatttcgctgggagaccgcgagaggaacttcgaaccctagtcagatttcctgccaacttgctcatgcgagattgtaattttatgatttaatgacaggactcgtagttcttgcactgaccggagagattgttcacagagcacgtgaagtcattgaagcaagatacctggtgttcagcgagattgtagccgtacccagtagctggttcgacgcgaacgatcccatcaaaggctacaaacggggagatagactattccagtcgtggaagcttgatatcgcgcgttctctcactcgacccgaagtcaaatgaggactggaacagaatgaagggcaagaaaggtcagggcgaagccgaattcacgtgactcagctttgctcccagcactcgtgggctgatctctctgtcggcacaaccgcctcgctcgataaggagaccttgaccaccatgtcgcggaactccgaatgcatttctgggaccaagcctacaggaaactcctcatcacggttcctgtctacgtatcttattgcccgcatcaagacagtaccgagtctgaccacacattcgcttcgtggaacaagacccggccaatcccagaaatcccaatcatatggcaactccgactcgcaaaaacctggcccaaatagtgcctgcaccgcactgacgaaatgataccttagtgaccttcaaatgagttctttagttggccagaatggatcatgtattacttcgcggcttgagaataagctcattgccaaaaataatagacagtaggttgagcgcgtcttcgcatgaaatgcattggctttgagccgtatgttctgctatcccatagaggtatggtggtcagaatagagcctctcgcaggtggaagaagatgccgttcaaattgctcggtcaacagaccgatgagacgtatccttcctgagacattgtgtgtttgtgttgagaagaaaggggtggaaggtttagatctaggtacttggatgcgtttgacataggatatggcgtaaggggcgagccatatgttgaaattggatatatcggtgaggtagattgaccagcgaagtcatgaccatgctatatcggtactctagatccgataaaagaacccggccgatcagacattgcgtcccgaggagtctagacggtgatcatcaccaagggttctgcagaatattcctcggcgctagatcaagcgcgaaatcgatatcggcgtgagagctgtgagcgcgagtcataatacctaattcctgaattcagtttaattgaactttatagagagaaaggggggggggagggtttgttttttttttcaagcagaagacggcatacgagatgagcgctagtctcgtgggctcggagatgtgtataagagataggttgatagcaaccgagtggagctgttcctaggtttccatccggatatcaaagaaaattctatcagttcccgatctgctcctgcggacgattggagcgttcgtcttggtccattcatcctgtcgtctttgagcattcgagcttattgtgtcgccctggcatcttcttgcagacgccttgcataatcatcttaacatcttgcgccttctgcccagcgacaaccttgcggataaggaggtggtacagccggtgggtgaagagttagtaggaacgaatcttctcccgatcgaatcagctcgtccaggttgtcatcgagacattcgcgaagggactgcagtgaaagatagcaaagatcggactgggcttgtccgaatgtctcgctcgggtggattgctttcagttacagcaggagtttccttattttacaactttgcgtccagcgacatgccttctcgcgctcagatcgtgtcgcttactcgtacccaaatcgatccggcaggatcaggggtgcaagcctgccacgaaaatcaggtcagcgtcataatttacaaaacgaagggcgaccgcgaccgaatactcacaagctccaggcataaatcacgtagcagatccagctactgacgatcctcatccacatcgcagcctcggaacgaccgatgtagacgtcgggctcgtcgctgccagaggcgatcgccgagacagtggaaacaactcgcctgtaacagcatacattgtcagacaggatcacgaagctcgatacgggctggaacttaccagtcggtcaagaggccggctacatacatcgctgccatgacaaagatgacgtggaaccacgaatactgagcgtcgatcgcacgtcagcggtttgtcatcgacatgaccgattagcagagtggctcactcacattgtacttggtgccgcttctctcgtcgtccctctcgactccggtcacttcgtcctcgtcatcagactcgggctcatcgagtgcggaagcaggaagagctctgtagtaccaaaagatcagctctgtcacggacttctcacacgcgaccccgtccaacgtaccccgcatcgacagccgccttgatggcttgatacctcatttcatcttttcggggtttgggctggctggtgaccatgcgaacgtgaccctcttcgtctcccaccatctcgccgtcgccgtccggcagagcgatcggtccgacgtttttgccgttcccaaccagggctttactttgggtcgccgctctcgaggtggagtacgcgatcgcgaggaacgtgaacaaggcaccgagtaagatggtcgtcttcttggtcccggacctgtgaagcgggttacattccccatgtccatcgtcgttgtgattggctacggcagaggcggtcaagtaggtgcaatacgcggccaccatggaagcctgagcgagaccggatttcgggttggcctcctgaacggacggcgcgatggataacaaggtcgccatgattgacaggatcagattgaatgtgatgaagaaggtgttggtcccgcatccagatccagcaaagaagatgtagaggacggtcgtcatgacgatcgcgcccaggtacagtccaaaggtcgagcccactagaatgaactgccataggtttgattgcgtttccgaggattcccagcgatccaagcatgtttcgctccacgagtgtgcgaaatcgaccaagagcacgagtccgatgaggataaagaagaacgctccgatgggcacaatgtagcggccatagaacatgaagaactcgttgggaatcaaaaacgcaaggaagctgagcaggaagaaggagagtaatttcggtccccaccagctttgaaagcgcaacgaagcgataagcgaggacttgaaacgtcggtgtggcatgaaaaggacgtacccgttttgcaccgccgctcgctttgctttcgtggacttgacgccgagcaatagcaaggcaaggattgagtggaagatgacgagtgcaaattcgaatcggtgcacctgttgagaacaaaaagcatagcaggtgtcgtgttaggccgggtcccatatgttgcgtaacgtggcaacgttcgtgtggtgcttacagccaacaatccgtagcatttccctcccgagcaatccatcttgatccagtcccagctaagcttctcgatctgtctgatggccatatccgtgcgtgagacataggccatcatggccgccaacgcaaagatcaactgtagaggcgtttcacgttagctagctacaaccaggcgcatggcgagacgacggtagacttgccccgaaaccgactcgggtcgcgatggatgagttgcagttgcaactcttgcaaaacgccgaagccgctgatccccccatgaacaacatgaaccccgagaagagactcgacccgatggtggctatgcctccaccgagaaggggcaaagaaagaagcgcgcccattgtccggattaaggtctgatccgtagacaccagctattcgtaaactctgcagatggtgctgtgatcaactatttaagaggtttgacttccgctaatgtcggtcgggccgcagctttctcctgcaacatcagcatcggattgaaaggagtaaccatcacctcgaacactgaactgtgtggagggagggtgacgatcgaggtcatgattcaggaattgaaaacgcataaacttgccattttatgcgttttcaaatgaccccggagctggcctccgcctgtccatgtgagcttgctgatgtcgtcgaagcggtcctttgggattgatatgtgaatgaacgggttgatggatcaacccatatcagcgtcttctcgtcctttcgtctctggtatagcagattcgatcatccctgtcgttagcagaatacccagaatcaaaagcccgcttccacgaccagcaacggtgagcaatgaacgaatattcgacaggctccgactcggagtatgccaacaggcaagttccctcgctcgcattgctgttgtaatcgcctgggacggatgtcgctaatttcgattcccttatggtaccaacagttggatcacttggttcctgtcaaccaaaggcaatgaatatttcgtcgagatcgacgaggattacatcctcgaccggttcaatctgacgggattgaacggcgaagtcgtccaagagtacgctagggcgctcgacttgatcacggaccagctaggtaagcatgtaccatgatcgcctacgaaggctcgagagaccaacgagcaagcgtcttgcaaatgctgtagaagacgaagatgacatggacgaagatttgcgggaaacgatcgacaattcagcgcggtacctgtacggcctgatacacgctcggtatatcatcacaacacgaggcttggccaaaatggtgagctcgtggcatcccggattctgaggatgtaagctcgtgctgatcgtatcgcacgacgatagctcgacaagtaccgcaatgccgattttggtacctgtccccgagtttactgttatcaacagcccgtcctccccgttggactggccgatgcaccctaccagaaagccgtcaagttatattgccctcgatgcgaagacctctactcgccaaagggaagtcgacacgggaacatcgacggagcctatttcggaacgaccttccctcatatgctgttcatggtctacccacatatggttccgagcaaaggtccacctgcacccggaccgggcggatcgggtggacaagtcggacacgtaggaggagcttcgggcttgtcaggttatctgggtcacggaccgaccgggatcggttcaatcagcacggcggcagcggcgatcaaggctgaggtttacgatcccaaattgttcggattccgggtgaacgagtcggccaagctgaaacgatggcgagaggcgatgcgggacgagtaagtcgagctatagtcggtgccgagcatgcaagtcgcttccactgtgctgattggctgcgactcttttgtttctcatttcttcaggcaagtgaaacgcttagaaggaatcgagaaggaagagggcgggactggaaacaacttatgaaatctcgattgatcgtgccttgttatagatatacctttcatcttaatgtcaatgtactattcgtcgtgattcaactggtaatcttctgacagaatttgggttgaggcatcgcacagccttcttggacctgacagcttatgaagagctacacaaaatgctcgacagcaccggcctggcttcatcaggctcctgccctgtttgactgcatgaggtaacacccttcaaataggtcttgcacttaacacgcatccctgggcactaataatctgcaggcagcccgtaaagaggttacaaagcttgcttcttcaaccacttgcgcgccttttcgtctccagtccggttaagaagcggcatgacttcccttatgcactgatcattgtggtctttcagccactgcgcttcttctttggacagcaacgtaaagtcgaccagcgatgcctggataggtactcgtgtgacgcgctcccagcagagccaaggcgcgctgccgacaccgtatctcgtctgtacgagaggtggcagcagtcagtaacctccttttctcggtctggacgagtcgccgttgcgtcttacttctatctctttgcagacgatgacgctctcgatccggatcccccattcgccctccaagtagaaaccaggctcattcgatacaatgtggccgggcttgatagtcgtagcccaaccgataccaggaggaactgtccggtaaacaaaatcggtgagctggatagttgcataaaatgacagtctagcacctacgctcgtggacgctgtagggcaacgaaggcgataagtcggttgcctgaggccgggtgtgaccatcgaccagggtgacactcacgaaagataagagccgatgccgtgccccacgccgtgtccaaagctcaagccttcacgccagaggaattgccgtgcgagcgaatcgagtcgatcacctttcaccccttcagggaaaggcgtcgtttcgatggcaatctgaatgcgacagagtcgtgacttgagctctgtagcctatcgaccggccggaagaatgcagcacttacgtgaccttgcaagactctggtaaatgcccgagtctgatcaggagtaggggttccaaagtgtctatgtacgtgcaccttgagcctactgcgcttgcatatcgagtcgaggcgatgcttacaatgttcgcgttgtgtcgatggtaccatctgcatacaaggtttcttcccgtcagtaaggggttcgtacttcagccctccgttcacttcgtaccgaggtactggccgcccgcatcactgtcagagggcgaatcagctttagtatagccgctttagcctgctggacgcgtccaactcacatgacataggtcgtctcccgatcgaggaagcgatcttgtcccctgtgcggaatataatgcggaagcgctgcgatcacgcccggtcagaccaggtctatattgatctgcagactgaaagacaagctcaccaccattgggtccagccgcgctgatgttatcgtatgccaagccgctttcgaggcattgaaatcctgatttcagcccggggtcaaaaatcagcccggtaaagagacactcaccggtaatactgctccagagacctgaactcggtgagcttgtcccctgcctcgcactctcccacgtcctttttcttctccttgacctcttcctccagccaagctagccatcgagtctgcatcggcgtattcataacacacggtcaattcatcgttcccgtacgggtgatgacagctagcccgaaggacttgccgttgcagctccgtcccggaggtaagctcgtcgaaatccctcgatctcggtggcgttcttgatcgccttcgccttgtctacagggcaatcaatggtcttgacattgtcctatcgacgacatcgaccatcggcccgtcagtacggactgattcttcgctgtcatttcgatgacgtcgaggagcagcggagcccgtcgggctacttaccagtccgatagcgtcggccaacccccaactggcgctggtcgggaccaataccttgccctcaacctcgagagctttttctccgctttcttccctgaccttaaccctatgttccaacacccatcgcttgacctcttccacgccataatccctccattcgaccccgtccgccttgagtttcgcctcgatctcgagcgtcaacttgtccttgtcgatgaaaagacaggcgctggaagctgtcagggcgaggtaagacctaaagacgggcacgttggggatatccccctgacaccggatgttcaataaccaggcgatggcgggcaagacgggaagcacgtagactcctccgtggttctctggatcttgatcccgatcttcgccaaacaaggatcgacggatatgggcgagtttctccgaggtgggttgaccggaaaagaacaaagggtgatcctctagtagcgatttggaataggccgggacgtcgggttgtcggacggtgtcgatcaggttctcggtgacgcctagaagggaaatgttcttggcacgtagggtcttctgaatcgactgcgcggtagctagagaatcgattggggatagcgagaaagggccgtcttcagtctcaacagccttttactgaccttcgtctgttgcaagactactcacgccagtcgatcaatttgggatcgatcccgatcctagccccttcatcgacattctgatgaacaaagccggcgagcacgaccaacccgacctgttcagctaccgtcgatcgccacgctgcattaacacctctgttctcacctttttgcaccattcccaaggactagtgatcccaggagaatctttcgggacgaccctgacgacgttccacagttccttgctcgtctgcccctcggcttggatccagtaccggttatccacaaagagccacgccgaggccttgccctcagcgccttgaagttgggatcgtccgatgatggctgtaccggcggaaccgctaaaaccggtgatgtattcccggcgttgatcggtcgaggcggtccattcggaaaggtgctcgtcggcggtgggtacgatactatattgggcgtcgtgtgcgttcagtcagcagtcttccgaaggataggttcgcagaggcgagaggtgtgccttactaataatcgagcttgtgctctactaacaacgcttgaagcttggtcaatctgctctcggcctcttcgatgggcaggccgagcttgaaagccttgacctcttccttgtgcgcagtcgtcgtgaaccctcgcttggccacgcttgacattttgtcaacgtccctcgatcgaggtttctcggtataagcgggaggatccggattgaatcgagcgtgatcggtcgagtaggtgcgggaggcggtggtggtttgtttctttgaccaggggaagcaggaaaaggacattgtcccgaggtagatcgatcgagcggtaggtgccagttgacgtgtcgagagcttgacgaggggttttatcattgcctgacactcgacatgcagcaggatgtggctagttgtagctggcttcgctcggttcgagggtatatatacattgtaaatgtatatggtggtgggtgcatatctcaatgtccgcatgggtcacacctcacctcacgacacactgcctctatccagagtagagccagtaggtcatcggtcatctgcgtgaaggacagaacgaggtggaaataacttaatgacgagactaacaactaactattaccgttacgatagtacatttagtgtcgggcccgacaaacgacaacggtcaaatccgaagcaatacaacaacgagcgagtccttgatcgaccacgaccactatcgacacggcataccagcagtgtagcagcccttcggtacaagctcggactcgaatcacctttcaaaatcagacatacgaatgacctatgccttcctcaactcttctgattctcacaggtaaaaacgtgacggaattgctacagtctcgatcgaccatcgactcggcactcgaatcacagtcccgagccttcaaagcctattcacagacgaatctaaagtcgaacggatcacctcgcatacctcccattcaggctcccttaagaacgacactgacctcggaggatgtcaccaccctggtcatgcctgctcgagcagatgccgctcgaggtctaggcgggatcgggatcaaggtcgtctccgtgcccaacgagggcgatgccggtctaccagccacgaccacgatctttgatgaaaagacgggcaacttgcgcgccgtggtcaacgctcgagccctgacggcgctcaggaatgcctgtggtgcgtcaatcactcagctatctctccgaaccccgcgaagctgaactactggcatggaatcgtcatcaccgtcgttatgccgacaggctcgacgttatacctccagacggtcctcactgacccttccgaccacccaacacatctagtcttattcggttctggagctcagatcagagcgcacgcgatcttgttcaagagcaaattccctacgataacctcgatgacgatcatcaacaggcgcaagacggaccggctggtccaactcggacgagagctagataaagtctttgccgagcatcgagggaccgatatcgaggtggatgtgaccctcggggtacagggggaagacggatccgagatggaacgggctctcgagatcgccgacgtcatcgtcacggcgactccttcgaccgaacccctcttcccctcgtccgcgataccttcccctcggattgatgcaagtggaacgcactcggtcaagaaaaagaccatcatcctcatcgggtcttacaaaccgcacatgctcgaaatacccagagaactcgtccagcgtgccttgacgtcagggggcaaggtgactgtagattcgagggaggcttgtctagccgaagcgggtgagctcgtcggggtcagacccgaacagatcgtggagctcggtcaagtcctcgctaccggtcaaaacgggcaggtacgggcagacgggacgggcaagggcgaggtcaggatatacaaatcggtcggaatcgccgtgcaggatgtggctgttgccaatgccatcatcgaggctgccaaggagctcgggatcggaacgatcgtagaagactacgactgaagtttgaacagaatgtaggctgtacgccgccactcatacatgagcatctaaagatatacattcgactagggagaatcactccctcttggtcgtcgattttgggagtattacagccgagcttgtctacctttctgatctgtacaagatccacgcgatctgacgctctcggcacctgcatgcctactcgtcattttcctccttggcctggctcaatacccactccctggccttgaacttggctcgatccttgcccgcatcgtcaccgattcggtcctcgacgaaaatgagcttcttgaacaagaacttggcctttttcggtgtgagcttttggtcgagcgctcggtcgatcaatcccctattggcacggaacaaatctgtcagacgagggtcaaggtcggttcgatggcgggttcgactcacctggcggactgaatatcgccgagcttggtaacctgatcgatatagttgttccagatgtcgagccgtttaggataccgatcgacgagaccctcaaagatggtctttccccgctcctgatctccatgacggaattcgagaatggcaaacttttcgatcgtcttggaatctacaaaaggttggtcgggtcagccatggtgtatacatcaccggcaccgggcgcactaacgttcagaggttggcaggctcttcaagcttcggggcagaagcgctcgagcagcatccgcattgtcccgggcgacgaattcgaattcggcgaaacttgtccagggctccgagtcctggccaaacttcttgcaggcctttttatagatgtcggtagctgcgtcaaacttttcggtctgctggagtacagaagccgtcctcaggtagacggtcttggcatcattgtactgagcggcttccttgaagagcttgtcaaagctttcggatgtgccgtgagcgttctccaggttgataagcgccatccacacgttgagcttttcctcttcctctcggaaagcgatcgtagtcagggctcgtcgaccgatatccttggccttgtcgatctcggataatgccaactggaatgacatgaactggatccagaggaaggacgagttgggcgaagccaaaagcgcccgctcaaactcggccgacgattcgggctgcttcgttcggatctcgcccgtcaagtccttgatgggctggtgaccaccttttctcttctttccagcctttccagactcttcaacctcgtcctcagattcctcatctgacgaggattcggagtcgtctccgccatcttgttgaatagtggcaccgttccagctgaaaccgcccttgatgggtagtgctgtcgaagccgctgttgacgattgggctttgccattcttggcgggtttctcgcccgaaagcatgattacctggaaagatgttcttggtcagtcccgtaacacctgagaggtatcgatccacggcgtcaggtacactcacatcctcctcttctgattctgactcggcatcctcaactgcatcaccctcgccatcgtcttcctcgtcgtcgtcctcttcctcgtcatcgtcgtcttctgcctctacatccaggaaaccatcttcgccctccgaatcttcatcctcgtcgtcttctacttcatcgtcctcgtccatctcggcgtcgagagatacctcttcatcctgttctacctcgtcttcgtcatcttcgtcctcgtctcccttctgaagaccaaagtcctcggcgtcaaagtaactaggcttgataccgaaggaaatcttgttggcctcggtgtcgatagcagtgatcttggccttgagcttgtcgccggcacggaagctcttcatggcttgagcgacgtcggcctttttgtcgtcggcgatctccgacttgtggcagagaccgctaacatttgtcccgtcaattttgaggaaaattccatagtcttcgaccttgcggacgatcgcatcgaccttttggtcgacctggaaatcagccaagccggcagaggacttcttgtccttggtcttgctggcctttttcttcagggtcatctcgacctgctccttcttggcgtccacgctgaggagctttccctcgacgacctgacctttctcgaacctggattgccagtcggcgacatagtcgtcaaacatctccttgatcatgactcgtgccgtgacattccggcccaggctgacgtagagaccgcttcccgtaatgttcttgacgatacctcgaatcttctgatccttcttgagatccgaaagggattcgatctccctatccaggatgatcgaattgccactggaaccagccgcatcgaccctggaaggcctggtcgacaggtctagctgtctgctctcggcatcgaccttgatcacgcaacacttgacaatgtcgccctggttgatttcgggcaacttgccaaagtcgtcggccatgtcggtagggtgaagccttccgacgacatttcgggtgatgctcaaaaagtaaccctgagcgttcttcttggtgacacgggcggggacgacctggccaggcttgaggttggacatgttcatgccctttgagatgagcccgttcgaggcttctgcgctggcgggcttttgcttgttggcaacgatgatcaagccagtatcgtcgctcttgaccacaacgacgagatcgtcgagcttttcgccgaccttgagcgaggccttgagggccgcgatcttgacccctcggtgatgcgccaggttgcccagggccaaaatggcctttcgctggctgggcaagagcttgaggacgatttggtcctggtggatctgagcgacctctcccgagacgacgtcatcgatttcgatcgcggcagccgccaagttggaaggaagcgcctgcctgatgctcgcaaacatcttttgcgtgtcccggtcgaccgaggtgatcttgaccttgacgggcttgccctcaaagacggccgtcttgaggtcggtaatgtaggcgtcgctgacttcggcgagcgggacgtatgcgacgatccccgagaacagctcgacgaggcatcccttttcaaacaccttggtgatgagacccggggtgaccatgtcgaccttgacatcgtcaaagccagagggaacggtctctgtggcctcgaccaagctctttttcagggtcagcttgacccgacccttttcaggctcgacggagaatactcgacatttgacgctctgtccagccttgaaccgtttctcggggtgtttgagtttgatgtcggcgtaatgcagggggaaaacgacaccctgtacgctacctgacacgtcgacgaacaaggccttgtccgtcaggttactgatggttccctgtagatagagaccgaatggtatcgtcagctggttgccatcaagcagtgcctcgccgggatctgccccgtctctgcgcgtaccttcatcatctcgccgaccttgacctcgctgaccaacatgaacttttggttgatgacctttggttcgaaactgagcaagaccaagccgtcaaagggcgaatgaccgagcaccctggccttgtgcttggttccgaccctgtaaggtccggttcccgagagactcgccggtcgttcgtcggcaacgtgagacatctgccagccggaaagaaaggggtgtatgtcccgtcaatcccgtcgatccgatgtaatggaggtcgctttcgggctctaacgactcacatgaacccaagctcggtagccctcccgggtggtacaagcgagaccccattccttttccacgcgctcgacctcgacgtcctcgcagatggtcccgatcgtcatcttttcctctacattctctccatcgaccacggggctcttgccatcgatgacgtggggtaacaggctgaccccgaataccttgcccgaatcggtcgtgccgaccgtctcaaagatgatcctcgccttgatctttttcccgaccttgtacgtctcgtccaagtctgccgaggcgggcacggggaggtgggtgaggtcgacggtcgagtcgaaagtcccaaagattttcaggttgagaccggtcgaggggatgatcgaggtgatcagcgccgagacgatgtgaccgggcaagagactgctgatcgtggtgacctcttgttgctgcaaaccacgccggatagaatcggtcagtgtcgcacgtcttcagctatgcatcgtgtggcgagacggcgacccacctgagttcgagcgacgacgaccggatcgatcgtcaaccgggcgatccgaccgttggactgtacctcggagaccaccgtatccaacaattgtccgacgacgatgtgcacgtctgccgggacacgaaaaacccagtcgtagagcgtcagtccccggcttgacgagtagaacacgactctctagcccttttcacccagggtactcactcttgacgtcctcctttctcaagaacccttcgatcccctcgactcccaacgctacgatccacccgtgatcctcttcccccttgacttctccggtgatcctgaaccccttggcgacgtccagtttggagacgtccttgttgaccttttcgggaatcagactcatctccaacctgctcgccaaccgggtgacctctgacggtgggtagagggtgaggaaagcccgattactcgattccgaggcgaacgactgggtgagactcgtcaggacgtattgaccgggatggaagagctgatgcagttcggggacgtctgtggaatcgtcgtccgaatctgattccgcaccgtcgttgtcgtcgtcgtccatcgagacgtcgctgtccttttcatccttggtcaacaggtgggtcagcgagttggagatctcggtgatgggtacgtgagcgaggagttggttggggagcgagaggatcaggtgtaggttgaggacagagtggactcgggcgaggatcttggtcccgggagacaatcgcttgtagaccaaatgctcgacacctgagggtcacgggcgttttagtagagggcaacgtcacatcaccgccctcgccctcgacttgatactcacggatagcgtccttgtccttggcttccccctttttaccatcatccatcgtagatttccccttgttccgtctgttctgggtcaaccgtctcttcttcctctctgcctcgacgtccttttctgcctctttccgaccttcatcccggacttccttgtactcgagcggggtcaacgtcgtcccgcctcctcttgggaaatcgccttcgtccgccaagagtgccgaggtgaacacgggtcggggttgagagctcgcaggtttgttggtggtggtggtatcggtcgatcccgatggtgcgttggtatggccgtcttcctgcctcggccgtttggtcccacgagcgggaccaccctcggactgtcttttaagacctgccatggtagtcaagtcgattcgtccgtttactaggtagtagtggtagttgtagtggttgtggtggttgtagtggttgatccttatgaggatcgttggttgtcgaaagtgtatgtaaatctgcttgaccaccatgtcaaagttagtttcagaaatctcgctcgctcgctcgctcgcctccgaacggggcacacaggcaggagggggaggccaggggtaatagcgtaatattatcaagtcacgtgaaaaagagagaagaaaaaggaggagcaccgagacgagggggggttgtttacaaagtcaactaggcaggccaagggaggatttgattaggtaagcaaagccataccatgcactatgacactagcctatgcagctggcggttcacatcacacacagatcaacgagcattcatgtcgataatccaacgaccctagaccgagcccaccttggcaaagcactacatccatgccaacatgaccacggaagggtacatgggtaagtccaccacccggccttcttcccacggtctccccgcgtgatcccgtctcacacatctcagcatgctcgaccgatcgatagactatgcaccctttgcttcgtccaagttcaaccctacgctctatgcaaacgccatcctagccggcgaacgctacgaccccgaagaaatcgctacggaagaacttgaaaccgctcggaacaaggacgagtcgacactcgtggacgatgcgagggatcagcggaaaggtcggggtgggatgggtaacgctccttcggggacggcgagcttgagcgtcaagggcgacgtctcggtcgccctggccaaattgaattatgggatcgtgagtactccggggcgaatgagagtcgtctcctggcctgcaaatcgatggtgaccgggtattgatatgcaaatgcaccatttcaggaagacgtggaccgacaaatgaagcacgaggtgattcccgccttttccgtatgagatgcagccccagactgaccttctccctggtggatcgacgtcagatcgaggaaaatcacccacttctcttgaaacacctctcttcatcttccaccctctcatccaacgtgaccaccatccagaccaccctctctaccttgtccacctcgctctcccgtctgcacagcaagatccacctcccgcattcagaattgaatgcccaggtcgagaggttggaaaaagtacggacggccaacgaggtgttgaggagggtcagcaggtttttggtcctcgcccgaaggttggacgggcagatgagcgccgtcctggcaggcaagtcggcagggcaggtaggcaaggacggaaaggatcagggcaaggaaggggaaggagagagagagagggagatggccaaggcggctttgacgatcgctgaactaggtcagtcggctgtggactgtcggcttggcagctcgatgaggacgcgcgatttctgaaccccccgttcgattcgatcagacgtcctcctgcaagaaccggaaacgccgaaatcgacagacgagaccgatgtggcaggctcgatggcggacgtcgcggtctcgctggatcccgaccagatccctttgaccagtctcgacgtcgtcaacgctcaagtccccgccgtgaaaagggcaaaggatgtcgtcatcgaagagatggaaggcatggtcatctctggactcgccaacctcgtaagcagacaccgaggtcgagaacatccgcatggcctcccccgcagaaggctgatcgatcgcgtacgtttgcagaatcaacccctcttgtcgacatcgttgcagacggcgcacaacttgagattgttaccccaactcgtctcgaacctcttggcagacttgaacgacgccgtcgaaacccggataagcaaggtgttcgacttggaaagtttgggcaaagaggtcgctcagaagggtgagttcatgatcgtgcgaaactcggtggcaatgtcccacccgcgtcttcgtcgaggctaaacgatcgtaaactcgatagaacaaccatcggccgcttccgctgcgacttcattgctgtatcggtccgcccgtatgaagacgtcgtcgacccccacgaatcaaaacctctcgatctttcacgacgtcctctggaggagactcgacattctgctcgaagatatcgcccagtgttgcatcaaggtgtatactctggaaaaggtactgcgcttgaaaaaggtcgtcaacccgaacgccggctttatgggaaccggaatgccggaacaatcggtcctggacgaggtcaaggaagggagctttttggacgagtgtctagagacgatggaggagaagccgacgtttacgttctggaccacgctagccaccagtctcgatacccagacgaggaccatctgtgacagtgagtcccgccaaactgatatcgagcgccgtgttcgcaagcccgtatgacttatgctcgcgattccatctttctgcaggtaacaactttctgcaacaagcgctcagctccaattatccccggtttttacgcctgtttcacaattttttcgccaagatcgccgtccataccgagactgtctatacgcaggagcatcagaggtaggtcgacacctggcacgattccgaatggccgagctgataccaccttgcgaattagccccgaaacggtcctctgcctccgagcgatcgccaagtttgaaacgctctacctctcacgatcgtctacccggatgacggatagtatcaacgcggctttcgggggaggatacaagcagccccccggatcgagagaaggtatgaccgtctcgagggtcatgctcaacgaaatggactcggcgaggtttgatccgcttctgggacggaacatggctcgattgatcgggaaagcggtagacgccatcactggaaaggtggatggattagtgagcagtcgacttgttctcgcaagacgaggtcctttcgctgacccggtcgactggcgactggtggccacacagctcatcaaggatttttccgcaacatccttgatcggaccgcttgcgagttccgcgcaggtcaacaactcggcgttggtcagctttgtatatcacatcgtatacagcttgagaaatcccttcacggagttcccgtcgcgcgtgacctcattgctggacccttcgcttcaggtgagtcgcgcttcattcacaggcagacgacggtgcggtcctgaccttgttacatccagacggccgaaaaatgttatggtgccgtcacagtcgcactcgataccgcgatcaagcgagaactgagcaccatcttcgcaagggtgcatcgggtagactttgccaaatcggtcgaccccatgagcggaatgggtatgggtatgaacggcggctccggcggcagtccctatatcaaggatctagccgatcgcttgacctttttgcgcaccgaaatcctcggccggttcgatactggagttatgcgggatgaatggcgagtagcagtggaaaccatttgtcacacggatgacgctattgactagcattgcaccctcttcatacaggctaatgtctctgactcgccatgccatccaagcgttcctactcaacgcttccatcgcccgtccgcttggcgagagcggcaagctcaagctgacaggggacatgaccgagctcgaattcgcactcaacacctttttggccaccggccacacctctcgtcaaaacgccacacggctagacgctgccggccgggattacaagagcttgagggcattccggacatgtctgttcttggatcacacatccctgtctcatcccgcggagacacaaggaatcgctccgttgatccttctgcaccacatcgtcgtgctttcccctctacaactgccccaccagattcacgagtggtcagagcaagaatatatcctttggatcgacaagcattcggaagaggagggatggcgattgttagaaaaggctgtggacgggcagagagaggggaagggagctgaagaatggcgaggactgatcagagaggttttggaaaatgcacgaagcggcaagatgaagaccgattgagcgcgacactgaacattacgtgcacaaggttgtattaacggccacaatgaatggcttagatgtagattgatagcagaccattggaagggagatgtttctgttacactgctattcaagctccatctttggctacacggggaaagttctctttccagctagctgcatcactcatatcgctcccctcctcagcgtaccattcccgcttccaaattggagactttttcttgacctcttctaaaatatattcgcaagcctcaaacgcctctcgtctgtgaggcgaactgactgctatcacaatgctggtttcgcctactgggcactccccgagccggtggtggattgcgattttcgacaagcgatctcctcctgctggggatgcggataaaatgttgtgtggtgttgtcgactgtgcgggcaggtcccgggctgagcggacgatctgttcgaaactcttcatacataacaccgtatacgcctcatacgtcaacctcgtgacgctctttcctattgctcagatgtcccgatcagtctctgccaaactctcgggctcgtactgtcatgctcaccttgaaaactgttcctggtggttccgataaaagtggcgatagctccagctccatcatctttgaccgtgttcacgattgatccagtgtccagtcgttcgtatgtcaattcgaatgtatcgcccagattgttcgtcagtttagctgacctggatgcggccggatatgacgtcgattgggtatcgctggtagtagctgcgttcggaccgcgcacgatggtatttccaaactatggcagagtttctttagatggggtcaagctcacgagctcacattggactcaccttgtccttctcctcaatggcgacgcccgccattaatgcctcaacgttgtccatctccgcctcttccgcatgcgcgcctgtggaatcttgttcattggcgaccgcatcctcctcgtctccttcctcctcatcttcgtggtggttggggtttcccatcaacatgtcatcgccgatttccgctggacattgcatgtggttagacggcttgactcgtccggacggtctctcataccagacttacctcgctctttccgcgcacgtttgccttcttcctccatttccgtctggatgcgctcctgcatctcgaccatctccttggcgtctttacatgtcttgtatcgctcgatcaggtgtctgcagacgtcgagtcagtacctactcgcataataaggtcgtgatagcaaactcaccggttgaccttcatgaaagaatgaccccaggagaacttgctcatgctacaagtatgaagaaacccattctcagctggggatgcgagatcgccgaaggaatctaacccgaatcgactaacagcttgtcgccgtagctatcatagcccgtcaggtagaatcctgcagccaaggcttcgacacagttgagtctccatggcttcccgtagtttaccgggttggtcgcgatcaagaacggtactgaaacaggtggtacccaatgagctcgatgaatctcggccattgtgcgatgtcgactcacataaccgttcatgaggacttctgatcttcgcaaatggaacctcgtcgagccttgcccatgaagcctctacgacggctagtcctccaagcccaacccattcacgatcggcaggcgagatagtgctcttcccatttggcctgcagggtaccatacagttgtaaggcaagagcgactcggaactgtcgatgaaccatgcttcacttacgtcagggatactccacggaatcgctgtccgacccgcatcgaggtaatgagaccatgacgagccagtcgcttgccagagcaccgcttggggtcacagtggttgaaatcctatcgattgcatatacagctcgtcagccagacagtctcgttgatcgtgtatgctaaggtgtaactcgaagactcacccacatcgccacagggacggcgatcttgacgttatccaggtcctcttcatcaacctcatgttcatcctcgccctcgtcatcatcttcgtcgtcatcatcatcatcgctagctgagtcttcatcgctgccatcactgtcatcctggctagtatcctcctgactatcctcctcgctctcgccgtcatcatcactgtccgtaacaagactcgcagggatatgctcgtcgacctgttcacgacgattgttcgctccgttcctcagacccttggctcgaccggatgccccggccggagcagcgtttcgtccgcccaaaaatgtgcctcctcgacccctagctttggaaggtttacccatgctcaagatgatttgctgcagggagaagtttctgatcgggtggatgggttgttggttgtgcgaggcgagaaagaagctcaacagactacagcaaaaccaggacccattttgaagcagatgcacgaaatcgagggcgagcgatcaaagtggaggtcgatcgtgatccttcagaattcagacgaggctcgttcatgagtagtgtaccgcggacccaaggcggactcgcccacccaggactcttcttcctgtactgtgctatctttgcccttgaaacatgcatcgatcgcatctacaacaagcatattcaatgtggcctggatgcgccatgcatttcgttgcttctaaactatacgatgagacccttggccacagcaatctcggcgttgatgacactactggtagcagcacccagcctgacgttgtccaggagggtgacaaacttgacatccaggacgttgcattctctcagccttccgacgctgacacaggcaccgttctccaggtcccggtcgagtcgaggctgaggcctgtcaggagcgtcgtgatagacgatcgctcgttcaggcgccgaggggacgacgtccttgccgagtgtttgagcttcacatgtgaattcctggaagcacttttgaacctcttcgatagagggtgcgggctgcttggcgaacttgaccgagacgcaggcgagatgaccgtcaatgacgggaacccggttgcagttggccgagatcttgagagggtgggaagcgtggtagtcgaatcccttttggtcctctttaacccctcccaagatcttggcagtctcccactcgatcttctcctcttctcctccgatatgggggacgacgttgtccaggatgtccagcgacgagacaccggggtatccagcaccggaaatggcctgcatcgtggtacacatgatggtctccaggggcccaaacttgtcttccaaggctttgagagcgacgacgaccccggtcgtggagcagttggcgttacagacaatgtaacccttctgcaagcccaagctggcacgttgatgctcgatgacggaaaagtgcgaggggttgacaagagggacgacgaggggcacaataggatcccgtcgatagtttttggcgttcgaaaagacgacgagctcggcttgacgaagagatgcctctgcgaaaagcccgaatacgcatcagtttctggagtttctaggtaggatggctcgtctaggcacatagtgactgaccgatatcaccagcgacgtcgtggtccaatccactgaaaacaacgccacaatccttcattcccggagcttctttggtgcactcctgtacgatcatcttcttgaccttttcggggatgggggtgttgagcttccatttcacaatcttggcgtactcctgaccggcagaacgcgaagaggcagcgaggacgtgtagctcaaagtatgggtgaggagcgaggagctcgataaacctgcgttgagtagaggagctataaggactctatatcgaattcttgacatttcaggcgaaacatacctctgaccgacagtgcctacgcaggcggccaaacgtggttcagcgaattgtcacttgacttgtgaggcactgtgcccagctcaccggtagctcccaagacaccgactttgatcttgttttgaggcgcagaaaccattttgttttgtccagtgagtgagtctttgtacgatggtatacgatcacgggatcacggtaaagcgctaggtgctggatgaggattctctttacaagtttggacaatttgggaactattcgatccctcgttcgcacttgatctttcggattcgggtttgactcgaaggcgctttcgcttccgctcgccaccgcaggaaaatgtcagatggaaagaaacgtcaatcactctgacgtaatcacaacctgtttatgaaatgcttccgatcaatcatcaagcaggaagctgattagatcgggcatcgacttgccagagggcctcagtcatggagagaaggcaggtatgtcatgtcctacagcttcacagactttcaatactcggcgagagtgctcttgagctacaacttgagcatcatcctactttgagctatgccttcgggatcagaattccatacgaggactccggtctaccctacggccgcggatgccttggagaagcccccagggctaattaatcactcgagcctatcattcaacgtgatatgcaggttctttgaacagctcagggatcatccagcgaaacgaagagagctcctcgtcaagatgttcgaggtcggtcgtgcgtctccccttgtggatcagcaagctgaatgatagcttggcttcgatatggcagctattaaaaactcacgcaggtcctgatctatatcccttcatccgccttctcctacctgatgtgagcccagatccattatacattaccgccattgtcgtactcattcggaagccttattcttagcgcgatcgagaaagaccggtctacggtctcaaggaatctcaactagccaaggtctacgtcaaagttctcgacctggatccaaagttggaagcagcccagaagcttattcattggaagatacctcgacccggagccgtgggttcgcttgatggtatagttgttccaactcggacccagtctgacgtcgttcctacctcggaaggaagctaccggtgatttcccacacatctgttacgaagctatcaaagcaagacaagtgccacctaaaccggaagatatatggacggtggatgctgtgaaccaagttttagatagactggcagtcacgcggggcaacaaagtgtacgtgatatttgagacaactgccatggaccaggtgtttatactcttgcatggtgatcactgtagagacgcccatgtgaggatttttggagaagtgatgaagcacttgaacgcggagcagcagcgatggctcatgaggatcatacttaaaggcaagtttgaaagactaaagtatgcaccttgctcggttttctgacgttcgagtctcacgttagacctgaaaattagcgtgcgagagaagaccgtgttggcggtataccatcccgatgcccaagaactcttcaatgtctcgagtgacctcaagcgggtatgctggacattgaccgacaaagaaaagaagctcgagacaggagtgagcccatcatacagctcttccttgaccacgattgcgagtagctgactggcgatactgtaggaagccgaagtaaagctgttccgatcgttcctgcctcaactttgcaaacgaactaccaatcacgatttcgcggccatcgtcaagcacatgccgaaagagttttacatcgaggaaaagatggacggggagaggatccaactacataagcgaggaaacgagtatttctattgctccaggcgagtcgagctatcattatagctcttcacacaacgacagctgatcgggttagaatctccacaggaaggcgaaagactatacttacctgtatggtgctcatgttggagaaggaaccttgacaccccatatccacgacgcgttctcatcaggcgtgcagaagtaagcgctcaagatgcactaaagccgcccacccctttccccccagcatcaccgggactcatgtctctcctttgaatagctgcatattggacggcgagatgctcgtatacgatcctctcctcggacgatatctcgctttcggaacgctcaagtctgccgcgctcggtacgtagcaggaacaaagtttctgccgagagattggctgttgatatatacggcaactgtagaccgcacgaatcaacctgatgctccgagaccttgctgtaagtttaaggaagcgtcagggaattattgaatgataatagaacttgttttcgacagtcaaggtcttcgacgttcttatgataaacggtaccagtctggcccaaaagtcccttcgcaggaggaaggaggtcttgtcgaaagacagagtcttcaggacaatacctggtcgtttcgagctggccgatctttgggacggttcgaccgcggatgatatcgataaccggctcaaggacattgttgggctgaagcgagtcgattatggtctcgaactctgtgttgaggctaaccactgcgttcgaatcttaggggggaaggattggttatcaaaaacccactgggcgcttacgagatgaatgggaggagcgaaagttggatcaaggtcaaaccaggttcgatcgagagaatctctcatacttcagtctcgcgcttagaactcaaacttatttgtctgtctgctcagaatacgctgacgacatgggggaaactctagatctgacggtgctaggtgagtaattagagaacatatacagcgaaacagttcgccttggctgaaaactgtgttcaaggcggatggtggggtagtgggaagcgcggaggcaagattggctcgctactctgcggcctacgcaacgagaaagatccacctgaagatggttctctgccaacgtgagtgcgagaatcgctaagtatgctagatcaggtggctctcaattcgccgtctacttcagctttacaacattctgtgcggcaggaggtggactggctctgagcgactttgtttggctagagtaagctttggcggcttcatcaccgtgggaaccgtagctcgagattgttaaaatgcaatctttcagggaaaagttcggcgagaaatggattcctttcgaacgcagtaacgcgcctagttggatcgtctttagtaagctgaaacaagacgacaagccggacgtctacctccagcggccggacctatttacaatcaccgtgaaggcatcggaaattaccgtttccgaaggcttcggaatgggattgacactgagatttccccgcgtgagaaggatcattgaaaaggaagaagaggaggacgaggctgcaaagaataataattagaccgatgtcagctgaacattacgaccccctcacgaacccttattagccatatgacgaacatgaggaagacggccctctgttgaaagccgacatggctaacggacatatgtccggtcacgcgctagcgcaattttcacggagactcgcggcctagacgatgctaacgccttaatcagattattctcaatacgtactaccttagccccatttttctatatgaaatgcaagctcatctcaacaccctctcctgtaaccggaagcttttatcatgtttacgatgtcgaactcggaagcaaatgtcattcctcacctcctgccgcctttagtcgagtcagctcggtcggcttcccattcgtcatctcgatcacctgcacctagatatacgttcctccccgttcacgacgatgaggtattctgacattccaactctgaaggcactctactagtgtagctgtcttgcgaacctactcaaatcttacggagcctgcgcctaatcacattcaaggcgtcaagtcctgtgtctaggctgctagcgatcgttggaaaagtgcttgatctatccttctggggcctgcccggccggcttgataagagatcatgagatcgtaaaagggtcctcttgcccaggacaatcgccgaaattccgaagaactagctctccggcctagcagggtacaggttttgggtgtcggcacatcatgaatgagagcttatggaatggagttagtcccacgttcatgtgaagtcctatcgtgttgctcagctgattccgagtctcgtagatgagcaaggccggtgagcacttgaatttcttcctcgtttcagtttccttcaaccaagatcgatcgatattcgacagagttgcttgatctgtacaaacagagacaagagcggcggtactggactagcagtcaagtgcagtcagtcagcctgaggctagattcctatcccaaagctcgctaatgaaggttgtattgcagagaagccaaggctacggtcaagaaaaggaaggtcgttgcgagtcgtaaagtgcgtagtgtgcagccgattcgccctgtcagaagctgattctcgaggacgattgaaacaggcgcccattgcctctaacgtatcaggacaggcgttggcggatgtgcagacccgcgtcaacattttcagaggaaagattttccgtaagcgatctcaagagtcggacgattgccatactcctcggttgacagccggaatttccaagatgtgttcgagtcgaaggatcccccgaagaaggacctcgagaggatgatcgtccagcacggcggcgaattcgctcaggcgagaaccgaaggaaaccttgcgattcctatcgggaacagactcggccgtaagtctttcaggacttgattggcgccttcaaaacagttagtcccatacttttcgtagatcctaatgcacagggatacaagcggaagaacgtgactatcctgcgacccatttgggttgtagaaagcatcaagcacggacggatgttgccgttgactaaagagtatgtatgttgtaaaacgtgattgataaatgttaatgacccttgggtctcgaatagattgactctttacgcggacccggaagtggaggagggtccacattaccacataagattggataatctggactcccaagcaggcctgccctcaaccgcagcggatgatctgacagaggacgaggacgaatgggctgatgacggtggtgccgaaagcgaggaacggaaacacaaacagccttacccttcaccccctcgggacgtagatcttggaggcgtatggaacctgaggaatgtcaaatcggatagacaagttgaagaatccgagacagaaccggaaagcaacggggaacaggagcaggacctgtctggagaggataacagcgcgatctccgaaggaagtgtgagcacacccaaggaggcgttgtcaatttggttcttacgaacgtgcgctatagctacgagggtcggattacgatgacgcaaagcaagaagatgaatcgagcaagaagccggagcgggaagctaggatgacattaccgctgatcgtgaaatctgaggaagaatcgaaatacgtgagactaccttgcgatccaccgcatggctcaattcgctcatcacatccacgctgttagacaccaccgaccccgtctgcagaacacatatcgctaccgaagggttcgataaatgcggagtccgatcggcttgagggccgcagggaaggcgcctccagctcccccctaaaatcccctaaagagggaataaaaatgggaacgacggttgaggatctgaattatgaccaggatctagtgggtcgaactctacatacaacggagaccgcttagacaagctaatgcctttcgcctcgtagatttttaagcatctgtatgttcgcagggaaacatgtgctgacttggtggcaattgacgtactccgtttgatcgcttgctttagggtattctaccttgatacatatgcaggcgcgaagcgaaatgggctggatgcgatcaaaattaacatgcgggccgaaagcgagtgagttctggacacagacgctccggccagcggaaatgttgccgatcctaatattggcgcaatctcagactgtcagctgtcgtgccgatagtgattcgacacggcggcactctctgtgaagacctctttgctagtaatctgacgcacgtcatacagcacagcgatgacagtaaacggtataagcaaattaatcgagcatggaaagggtcagttcgtccatatcttctggcgtttgcacaaaattgacaatcatcaactgcaggtcgccactgaaacagataatcaccccggactttgtgcaagacagcgtctcagatggaagactgctagatgagaacggtcggtcttacctgttcgagaagaccgtcgcattgtgcatttactgatctgcactagcttctcaggttatcgcccgaggtgaaggagtgagtgtagacaagtgtcaacgacttacatgtcaatttagcatgtaatgctcggacatcttcagtgaacacgcgatccttcacttcggtattcggtcatctcaagtacgacatcgaactgaccgagaccgcgtcccttgacaatagaggttggtctcgccttgccacgtcagtagtcttttcaattttttttatatctcgttcgctacgtgaactagtacaaccaagactccttccacatcgcgaacgaccggaatcctcctgtaatcgagcttggatcgacgaaggtcgaatgtcaagcttgttcctagaccgcaacgtcctgctagttatcgacaaggtcgaaattcagcgcttccgtttgctacgacatcacgactccggtcgacgaaagtcgtcccgaaggcttgtcgcactccatgccgcgcggagtgtcatcggcggggccgtctgacgtatccgcgctgcataagagagccaagtgatggcatggtggtctaggtgatacgaagttccattggaattcctgatgaaggcgcaaaagtcgtgctgctcgggcaaaatgaaattgcctaagggcgtgtgtccgactagtgctgaggagcctgtggatgccggcgaaggacgatcaagttgtttttggaatgttttctacattttttgctgatcgatgtccagttcgccgtcggttcccgtcacgatgaggtgtttttgtaatgttttctacatttttttggtgatccttgttcggttagctcccgttgcttagtcttgacgccatttaaattggcgtgaaggcgtagcgacgcgagtacagcagcatgtcctgcgatgatggattccagacccagcaagctgggtcaaatccggctcgacaggccgatgttgctcccccgaacagcgtcatgatccatgtttgccagccggaggggcggctggtgtagaacgggtccatgatttgaacctcgtgtccgttccacatgacaaacctgtttcgagcagaacgtaaagcgatgtcagtgccacacttgacttcggcagagtctgttcatcactcacatgcatgtcgcgatcaagatcgcggcaaaccaggccaagcgataccaattgggccaggtcgaagcacgggcggcttcctcggcgggacccgcctccagatgctgatcctggtatcgctcgaactccttgacccccgccaagaagttcctcctcgcctggtcgaggcgcgcctccgcgagccggaactctccacggagtttgtcgaggtagacccgagaatgactgcagtgtgcgggcagaaaaaaggcggtgagtacgaagtcaacacaccatataccaagtcgatgctcacgctatctcattctcggcctcctcgctagctccgatgagcgggctttcgtcgtggggctgggtggcctccagcacgactacggcctcctcctcctcctcctcctcctcctcctcgtccctcctctccctcggtcgagacatggcagtctcaggctcggtggcactgcgctgcctgagttcgatgcccgaaaccgctcgtaccggggaaccttccccctcctctcccatctctgcccccttcgcagagtcctcctcgacgggcccgaatcccgccccggtcttcctcgaaagaagcgacccgatttcgtatcgagggtacggcctccccctccgcctgtcccacggcgtgacaaaagtgcttggggagagcacactcttgccacccgatgcggacacctccccccgagtcggcgtatccatgggatacgtcatttgcctcgcccgggttgaggcctcttcccctcggtccaaaagaaatgctccggttgcatcccttgaccccatgctcgacttcagcatgctcaactccttgactcgagcgggcagtggcgacccgttctcgaaggagtatgatccactagggaccatcatcgacggttgggcgggcgtggtcgactcctcggcgtttgcagtgccaaagagaatttccctcctctcgtcgatgcgctgaaggacgtccccgaccggtgtggtggtcgtgaacgtcgagccttgggggaccggctcctcctccgattcagacggttccgtctgctcgaagatcacctcgcacggttgcgagatgtgtcccaagtaagcctgggaccggctatccgacaatgaggccgtcgaattggccgtgttgccgagggagcggggagacgacgccgccttgtgaaccgcctctggctcgacctcgacattgatggactcctgatggctgtggtcgccaaaaggagtagccgactcgctctcgtcggcagaggagtcgtcggagctgtgctcctctggtccgaggtcttcggtgtctgcctcagaaccagaggcgaacagccccgcttcgaagtcttccgccgtaggaagtccttcgggtacggtcgccgacccgaccgtccgtcctgcgacggaagcactctcgcccgatttggaggtcttggggctcgagtggacctgtctcgaccggcgtgaggtcttgccagttgctgaagtgatcgaaaaggtcgacctgagtcgacgttgccttgatcccgacagcgaagcgccctcttcaccggacgcgttaccagaggggacaggtgccaacacgctcgtgtgctgcgtgctgtcctctgggttttcgaccgatcgagagtgatcagccgtggcgaaaggacccgcccgtccttccgaagccgccgaagcagcgaccgagtctcctccaaagacttcctccaacctccgagccagatcgctcgaataggccgggaagtttgggaacacgtcgggtccgtgttcgatcggcctgggtccccatggatcggtggcgggggaaacccaaaacttgccgagtggggtccagccgggggcacctacgagatgcaggaaaggtaattagtgccgactccgaatctttgggaccgatgggcgcaactcaccctctcccactggcttcatcggcgtctcgactccgggcagccgagatggccctacctggctcacgacgctggagccacccaacgacgcttccgacctcttgtcggtcgcctcctcccggtcagcggggactcctcgtccactcacagcagcggaccgtgagagagacatgagactgcacctctcgtccataaggtcgagagctgcatccctctcggcggttccttgcttcagcttttgcaagatcgtgagcgacctgttcaaagcttgatcgtggcgcgagttgtcggcgcctcccctccgcccggccgggccgtcgacctttgccttgagtcgggccaagagctcagcgaggtccaggctttcggtcgcctggcggctgggtcgttgaccgctcgtcctcctcgaggcaggagtgccatcctgaccgatggcggtctccaagattgccctaccccgtcggggcaggtcgtactccgggtcgaagtgcatggcgggactgtcgggacttcgctgaccgccctcccgccgagggtcgatcatcgggatggtggtgttcttggtcgcctcgggagacgacaccacctcctcttctgcgaggacggctcggggaggcggagtttgaaagtctccgctgccttgcacgtcctggatcgagctcgcctggacgcgtgcttgacccttccctgtcgatcctgccgacccttccgacccctccacgctcgccaagtcctccttcgaagcctgaactcgcctctctggaggcggaaagccgtgtcgcgagcgcccgtctcgccaagtccccctccctgggactgtctctggctccggcgtggtggatttggcgcgggccaccggcgcgatcgagattggtgcctccagcggagacctcgacctgtccaccgagccgtcctacgtattgtagtcatgtaccggtgtcagcaaccagactttgtgtataattcgagatgcgacatcaactcacgcttcctcccctgcgcttggccgcttccgccttgaggaaagagtccgtcaagagcctctgtgcgacgccgtttaccctgcggggcaaatccctgtattcggggctgggcggtgcgctggactcgacatcctcgtttccttgttcttcttcgccttgttcggcggcatcagattttcgtccggaatctgtcgcgcaagattgcgtcagcgagtgcgatcgggatatgaaaacaaggctgggcttaccttcggagccacttggctctcggctccccccaacgcttccctccccgatctcctcctcacttccctggccgctgtcctcctccggaccgacctcctcctcccgcttcacactaaatgatatatggatggatcaggacgagcgtttcggacgatgcgacagagcgatcgacttacgcatcttgctggaagctccacccggatccccgtcccccaatctccccgtccgagccgtgtccagcgtcgccttccgatggtgctcggctatcatcggacaagctgtcgatcctcgccgactgctcgtataccggtggggtcccggtaaacggcttgaaaggtggcagaggccggttcagcttgttcaggagtgcccggtagtactcgggcgtgttcctggccggtcgctggctggccgtgctgaactgggaccggaacgagatggagatctatgtacatcgaatcgtatcgtcagcttcaaaccctctgagccgccgagcaggacgcaagacttacgtgggagggatcctcctggtccatcatgtcctggacgtcctcctcgtggttcaagatggccgggatcttggagacgtagatccccggctcgctcctgctccgcgatttgggcgaccgggacgggctcttgctgtcggccctaacgacagccgtcctgaaggacccctcgggcgaggtggacctgacctccccgtgcgcccgactttgaccgggagatgcgctaggttccctttgcgaagaacctgccacctcgggaacggtcgccgccgccgccgcctcacccgccacctcgacctcgacctccgactcgggcactacgatcggcacaccggtagggactcgtcgctcggcccgcctgacagagcggtggaccatgtcctcgtcgtactccgagtgcgacttgtcccatgcctcgttgcacagaaccttggatgcgaccatgccggcgagcttggcattgatgtagtcgatcctctggttccgtggattcttggcgtgcatgacatagcggcgagtctcgatggtaggcgttcgtacctctgctcgcttgtcctggtcatgctcgaccgagtcccattcgtaggacagggtgaccgaggcgtcctccggtccgtccgagtacatcgatccgtgcaaccacgagtaatcgatagggtccctcggtttgtagaggtccccgtacttgtccccgtcctcagggtcgtacaggtcgttggcctgacctggcttgaggatacggccaggtggggtgttgaggagggtctcgggcggagtccgctcacgcatacgcttcgggtagaccttgcggcccggttgtgaggtatggtgccgacgtccgagcacgaggggagggcgatggaccttgtccccacaggggagtcggtcttcatagacgaacgtactcgaacagatgtccgagaacgagggagggtcgatgggtagcctcgatggggataccatgtagttcgagggctcttgacccgcttggttgatcgtcgaaccgctgtttgaagtgtcgaactcttcggcagccggttcgggggaggtcgtaatggggtcgtgtggtttgagatcgttcgatgtcaaaccggtcgtaaaggggttgtcaagaggacctggggcagaagacgaggagatctcgccagcggcctgcatttcctcttgtggtggtcgtaaaggcaagagtgattggcggtgccggttgtattcgttctggaggaacagaaagcgaacgatggggtcagacattggattctcggaaaccggctcggggaacagacaggatgactcaccatttcttcgatcgacatcttgtttttacccttcttggatgtcgtcgaaatcataccctcttcccttcgggtgttctccttctcttcaagatgtttcccgctcctctgcggtatcgggtccaccctcccatgtcgcttcgtcgcagcttctccctgggctacgagtgccgccagcctaatcctcgccgcttcgatctcgtccggcgtggtcgtcatgtgaacatgctggagctgaaatccgctcaaccccttgtcgttcttcaaggctcgcttcgcagccattcgagcgacggacgcttgctgctcttccgacgtcttggccggtggatagttgccgtacttctctggctcctcaacaaacgcccggatgcccgcgagcatctgcgtgttccgcatcatggagtaatcgggcacgatgatacttttatttgtccttggggggatgagggcgaggcccgatgatagaatggtcgtggacgacgacgatgaggatgaggacgatgatgatggttgcgagcaagaggatgatgttgatgttgatggtcgttctacgagctttgggtcgcgtcgtgattgtttttgttgttgactttgtgcttcaacaacttgtccggaacgaggtgcgcctgcgccagagaggggaggggctccggccgacaacctcttgggacgtggaatattgctcggctgcatcatgggatgaccggcggggagcatgtgctcggatgatgatggtggtgaccttgaaggatcatgtctcttcagagtcggcatgacggaccgtgctcgcaagcttgtgatcgacgaggtggatcaagggtgaccacacctcgggaccgatgcgcgtagcgatcgcgggacgctgccggcgatattgaaatgataacgaatgatgtaatgacgagaatcttgtgtgcttgtatgtgtgtgtggggtggaagggagaagctgctgatagacggtcaccctcgacctcggtgatcgtccgttaagcggcggtgttatcgaagtctaagcttcggaaacacgaaattgaaaacgagacgcgaaaatggaccaggagtgacctggtcgatggcgttcgtgaaggtcgaagcgaggtacaagatctctcaaagatgtggaggtatgtagatgatgtacgtagtgtttggatttggatttgaagtgggctggtgaagctcgtaaaggtttttcgaaaaacgacttgaagaaaagtagtttgatgagtcgaaaaaagggcaaaaacgaaaagggcgcgggggggatggctcccgggggtgtcagtatatatcctccatgccaagggttcaaacctggctaggagtgaaagaaattgcgatgcggagtgtggaaagtagaggaacaggggcaagatcaagagaaagcgcaattgatggaccatgttttgatgggaaggcaccgaatagaagtcgacaacaagcggaggatcgatgtggcgcgggaaggagaggactcgacacagcacagcagatctccaacctcgtgacatgatgccgtcaacgaggcgttccctgaagatcacctaaatccgactggcatcgacagggcgcatgaagcccatcaaattccttggatccgagcaaaaccgacctaggtatcgggccccggtcgtccgccatcccctcctatcgagtatcgcggtgtccgatccgccatcacaacaggccaagcgagtgatcgcatcgtttgtcgtcaagggatttattgagctagccattccgcaagtcatctgctatgaggtgtcacggtctctcatcatttacattccgtgagacgagaatgtgattctacgaatgatcgtcaaccctgaaatatggtatcccgtgatacagatcgatgatgctctaacatatcgatcacctgctacagatgcatcggtcgtgttgagaagtatggaatatccccgttggacctccagattgcatcgatgcttccatagcgtttgacgtcaggatcagtttgtttcttccgatgatctcggaatgtacgatcatcctcatcgtcatactatgaccgagatcgacctgttccatgccaataagataaacacgagccgatcgtgatcagattccgatgccgcggtcttccgatactgtcctccagatcagacataattcggtgacgcaagttcatcaatcgcactgaaattcggaatcgagttcgtcttgtcgtttcaccgatgactggtatggattacccctatctgacataatcgattccccttcgcttcctcgtcaccaccgacacgcatcctgccttaaaacacgctgtcaaagcttggcttccgagcgttcgtcagggtttcgtgccaagaccgactataacagatatgtgaatggccctattcaatgtttaggatagtctagcacattcaccagcgcctcaagggagattccatgatataccgttccagatccttggcaaaccgggctgtgaatctcccataatctcgccaaaataacggagatgaagagacagtcgaccgtcgacctttgtctggtaattcaagcgaatttcaatcaataacagaagggaacctggatcaagatcaccacctcagcatgaataacgacatctgacgtaatttacgatgatcacaagtcacatcgacctgttggcgtttcatgtcaagaaaccgatgtcgagcggatgcagggatgaacgcaacaaggtgatgcgtgggaaacacatcgtcaggcattcctgtcggatcgtatccaccctcagattgttcgcgtccccgcactgggctgcatcgaacacaccgtgaatgaatcgctttagatacatcagtcgttcaatgtcacgggatctcggacgaagtgtatcaggcgtgagcagcagggcgagacgacggcgccgagtcaggaatattcgatagatcagcgacgcctgtccgtattcggcgctcggactcgccttcccattgccagcattagcaaggacagcacctcggagtagctgttcaagtctgtagaggtcgagatgttcttttccggcaacatcgagcccattcttgctaaaaaaagatgggattgatggttgtcctgttctacagcggttctgctgggtctatcatgacacccatcgaatgactgcagaacacctctcgaaaccatcgacccgggatcccggcacttttcatactccatacgcttggtcctttccatggaagctgtcaaacgcagactttggtagtgggggtttgtatgtgaagaacccttctaagtgtccttggaccagaaactttgcgccttgtcgctgtgccgcatttgacacacgttctactacccgtccgctggtcaggcgctttggtaccccaggtatcaacatcatggctctgattttgcgtcccatatcgtaagccggaaatggtagcctgatatagcagcagggcggtcgcgctacatcctcgcttgaatagcccgtcgactactgaccgtccaagtacatgaatggttctttctgcccctccctagccccttggaaggttttttagaatcacccacctcccgttaacgatgatcagaggggacgatgaggttgtcatcccacggtctagtcgcatcgcgtttcagactcgacgggaccgggttcaagcttgtaatccaggtcgggctgaaacccctaacccggggcacatcggctcggccatgggacggcgctactgatacgcaggatacgggcttgtgagcgcccccccccgaaggaaaagagctggaaggcaacgaaacggtctctcttcaatcgagcccgtcagcccgcttcacctgataacgactctatctatataccttcaagaggacacactcgtacattcaagggcgagaaaaggcgactagctatcagtgattatcagagtagccatataaagatatacaccgtttccctctttatataaaccaacaaatgtccgtcaagaccgcactgatcggcactacccgtgtcccagccatctcgctcggtacatggtcatggggcgacaagacgtggggttacaagcccgaagatctgggcaagatcagggaagcatggttcgcctgtctagatgccgggtatccgttctttgatacggccgaggtgtgtatctgacgagctcggtccggtccaagcagaggagagaagtacgctgagattttcgagatttcgtacgtcattccggtcgtatcaggtttatggtgagcagcgtttcctggctcgcgggagataccgacgaccggtcctcaaatcgacgtttgcttgttcgcagggatgggaaagagtgaagagatcatcgggatgctgctcaaagagactcccgagcaagatcgagccaacgtcatcctagctaccaaatgtgcgtttcccgtccgggtcccaaggctcgtctacccctctctttccaagctaatgacgacgatggcctttcagggctacctctgccaagccctatgaattggtccttcttcacccctggaatcgtcacctcgctcaaagcgtccctcaagcggatgggagtggaaagcgtcgagctattccaggcgagtcctcgacttccgagctacagcatcatcgcggatcggcaccagctgatacggtttggaggggagctgaacagattcatagcaatacgtcctacttttcgtacgactcgcaagccaagcaattggccgaggtcgtcaagcagggtctagccaagcaggtcggtgtcaggcaagtcgattcagggttcagatggtatggggacggctgttcaggagaaggctgacaacggaatgacattggatcgagtagcaattatagcaaagatcagttgtacgtcgcctccgatccggccgttaacgtgcgaggcaacatacggtcatttggaggttgcgactgactcgctctgtttcgaggttataggattaagatgacggccgcatgcgaggcgcacgggatcaagctcgcgagcaatcagatcgagttcaacctggcccggacgttgcccctgaacaacgggttgttacagtacatgcaggaaaaggggatcacttgtctcgcctgtgagtttgccccgatcgacgatcgaatccgattccctttgatggccgctcatcccctcgatgtagactctcccttggctatgggtcgacttacgggtaaatactcggccgccaatcctccaccttcgggcaggaaattcagcaatatccccatggaaaagctcgagccccttttggaggtcatgagacggatcgcggggaaacacgatgtccccgtgagcgcgatcgcgttgggttgggtcatggccaagggggctatcccgttgggcggggcaaggaacaagtcgcaggccgaacaggtgggtcgtgcgggtcggatctgacgaacgtcatggacctcggaaacaccgcgagctgacgacgaacctcggtgttgaatccgaacagaatgccaaggcgttgacgctcgagatgagtgtggaagagatcgccgagttggacgttcacgcgttggagggcaagaactcgttctggcagcaaggatgagatgtcgttgtaggatcgtagggtagctaggtagactgtctcgaggagctctgtaggatctgttgtgacgtaggttttgggtgcgggaacctagaaataattctcggatgcgactgattgatcccgcgcgtcccggtgataagaagaagggtggaagccaccacagtatccaccgagcggggaagcgtgggcggggcggggcagtcaccccccgagctcgtgagtggcacagcagagagggtttgtctctgatttatgtctctctctatcttttctgttcccggtccacacgcacataccccacctccctacctcacccgctctcttgatcgcatattcgtccgtcaagatctatcatgctgcatgcagacagatgtatccagatgaaaccatgttcacacttactaccgttcaagatattatagacccggggtttcacaaagctcatcgcctagccactcggcaggagatcagcgacccagtgtctacattccttaccgaacagcttgaccgcatactcccacttgcacacctgaataagtcgatggtagacggcacataaactcacgtccacctcggtcgaacgccccagacccaggacggtcgactcttctttgcctgtatagccgaaagtccctgggatcgaggaccgactatgcatcttcgtaaagacaagctcttcagctcggcttcccggcaaactgtctttctcgtcctcttcttaccgtgcatcctgatcgtcctctggctgaacaacccctcgctgggcttctttcctcaacgccggtccacctcgagatggagctctcagcggatggacgagatgcttgaccgaaggaatcgcacgatgggtctcgccagtcgggtcaagaggacgccggatgggtctgggttggagcccctggcgtatcgagagttggaggagagggtcaaggcgttgaagagtcagtgtaaacgggacaggttccggtgggagaagaaatacgggtcagtcgtcatgggcccacgaatcgatcggagacggttcaatgtcgttgatccagttgacgtttccaggaaacgaaacatcgccatggccaggacgtatgaaggcgagtcctggtgtctcatcgtctggtagcgagaaagctgaagctgaagatttgcatggttatcgttccaaaacaggctcccgcgctcggctgagggatatggtccgccgtaccatcctgggtgaagaactcatcctgggagctatcggaggttcaggcgagtctgcttccatccccgcacgctgtcgagcgggatcatcgctgacttgtcgacgagcagtgacgaacggacatcagatcgatgcgagcgagacgtggatcaaccggttgaccgagtggttcaacacgttcatgccgccgtcgagggactaccagaaatatgctgctgcgcagcaggaaaaggagaaaaagggagaggcgacgcaagaggtttggaggacggtgagggcgagcgagaatgggtggaaagggatcaacggagcggtaccgggtgagtctgattgacgtgtgtaggccaattggccggactgaaatatgctgactcgttcgaccacgttacacctcgaaaagctaccggatccgactatttctcgttctgtcacgcccttcacattcctacgtcgagttccaacctgatcatcatcgagctctcggtcaacgacgagttcctgcccgaacacacagagaatatggagaacctcttgagggggatcctggaatcgccaaatcggcccgcggtcatcttggtccaagcgatggcactttcggggaacagcatggcaggaggaggagatgtgcatatgcctgtcggcgtgtactacgacgtgccaatcatcacgtaagtctaggcggtgtggtatcccgagggaccgaaacgcttacgggacgaattgtggtcacgcatcgtagtcaacgaaaccccttggtagcgcactttatgaccaatccggatctagtgcatccgtattacactaccaactggtggaaagaccccgacacacggcatattaacccgagagctcatcaggacttggccaacttggtggcttcgttggtgcaggatacggcgtgcgagctggtcgaagatacacaagaggaggaggaaaccgaccaccggcggcaccgcgatgatgatgatgatgacgacaatgacgatgacgacaatgatctcaagcagcaagaacggatggacttgattatggaaaggatcttgacggaacatttcaggacccaacccgccgtgcctcttcatccggcgtcagagttctacgatcaaccctttgacattcagcaacaacgcgagctggtcgtcaaagacgaaaccttttggtcgtcgcagccgaaggacgtccgaccctgggggccatggcagcgcgcaaaacatgccgagggcgagctggagcgattatgggaaggggtgtggccgggtgaatggcagcacggtaatgtccctagggcaagtacgacgtcattgaaacagagaagcctgatcgcagactgatctgaacatcctttgatctgccgcactgtttcgcagttgaggtttctgcaacgatgggacgagggaacgaccaatgtaccactagagcctcaatgcttcagtacgcgtagcccgttgtatcctctcactccgacaacaaacactggatggtgagcttgcgcaacctcaagcacaacgagaccgttctacgtgactgacgcctgtgacctgtgtctactctgcaggtcactctggtcgcatcctgacaatacacaaaaggtctacctcaaggcggaccaaccagactcgaagctgaccttcgacatcgagactcggatgggtaccatcaagctgtacagtttgcgtagcaagacatttggcttgggaagtctcgattgttgggtcgacgatcgggaacaggagaaagtcagagcggacgggtggtgggatcaaggggatctgaatattggaaggtgagcttgggtctgatcgcgtcaggaggtgtccccgggccagggtctcgatgcgcgacgacagaaacggatggttgatgcgattttgctgggaaatgcataggttcacgacgatcgcgaccggattatcaccgggtgtgcacacagtcacatgcgtgttgtcgtcagagacgctcgacccggatggcgggaccgagttcaggttgatcagtctcatgaggcgagtcccttccggcccccggacctgggtcggcggtgtgccctctcagatcagagagctgacctttgggcgtcacaacaattgatctttcttttttccatcgttccccttgacacgtcctcgcttgcggtaatggcaacgatggtttggcgacttggatcaaccagtctctgaagtgtctcagagcaataaaagagcaccaagaaaggggcgtgttcagagtttcccccaaccgagccggcggcaagtgccccagttggggactagtgggggggccattgtacattagcgagttgtatcacatggaccatcttttcgggctgttcgcgctccgcgcttggtgcctgtgcgagatcgcgagccttcattaagcggaacagaaaaaattgaccgaacgaatcagcgtgtcagatcatgcaaaagccgcggcaaggtcattcgtgattgctcttccgatttcacggagtttggtctggtttgtcgagcgattgcgcgaaggctgggatatggcatggattgcagccgcggtaattgaattggattcatttttgagtgacttttgccaccgatgcgaacacatgtgagagatgagagaggatcgcgcctccatctcgcggaaaaaggcagtggtcgagaaggattccgttagcgctgcaatgatcaaagaagccgcgagccgcgacatggccgggatcgaccgcgacgcggttcgaatgctgggggccaacgcacgcgggaagcgacaggaccaccttggggagagaaggacggtgcctgagaaatcgcaactttgctccgtccgcgatgggcgcaaacgggagccgtaatcgtgttgcctttcgacgtcgccttgatcgaacgctgtggtccgtgggggggactcacgtcttggatgatgtgtgagtgtgtgatcaacagagtgaaaatgtacagccgtcgcagccgtcgtccgtgggggagagagacatgtgatgatgattggaccgaatagtagtgtgtgaatctttgacggcattggaagcccctctcctttccccaatgcccggataggttgtcatagtctcacgatcaatgaggcgtggggagaggggaagtgaaaaacacacaggggggggggagagtcctatccaattgatcgtcctcgctcgcccggggggtttttcgggtcgatcccccaggagcgtctgatggcctgatgggtaggagacacgtatccaataagggttcgatgccaaaaggttcttgcagtcttgtcgaggttccatcaaattgtaacgacaacatttagcttgatttttgatcgacctcagcgttttcccgccctcgacgtcatttccacggtgggatcttgcctactttttctcgttcgtgggcgtgtggatttcccccctttccctccctggttcccctcctgcccctgccgcctcggttgcgcgcgcgttcgttcgtttggatctccatcgcccgagcacacaagacacactagcgacaccagtccaaatccaatatcctcatcaaaagtagacctctctacacttctctacggtcgccaagaatcaacagacgtctagcttctgcattcatacacccttagggacaaccaagtttcgactgggagatagcttcgcgagacgaatcaaagttggatctcaatccactcgaccaggaccgggcgagtaaccacttcgaggcgtgcctcggctcccgacaattcgaccgtccctttttttcttctccttcttcttctccttcattcactccgtaagcatcctttcatggtcaactcctcacgacatctcaactgcttcaagaagcatcgtcgtcaccgtgttcgatctttttaactgaccttttcggccgctcttccattgcttccggcaatttcacagagtacctctatctcaggtctaatcaactcgttctgaaccacggcgacctctcaagctcgtcatactacgcgataacttcccggctctcttctttctttgttcttttgagctctcgcttcttggaccactaccaccttaccgatatccacaacggaacgatctaggctacctcgattgacctacgacgcgatctcgcagcgatacccctttctcgcaccacagcccgaatcacacctccgaaaggccttccaacacgatgccttacatggaacctggatctcctggcttggcttcccagcgaagctcgagcgaggacgacttcttgtcgttcagcgtcgatttgaaaaagaacgttatcaggtaagctttccggcccccgagatcttgctggtcagcccaggacgcgaaactgacaaaccctgcttgatcgtacccagtggaggagttgaagaatcgatcgagaccactcctcgttcggctagcccggatcgaatgagggaaaggtcgacatccgtctctatggccacgacacccaagaccaatcagggagcctcggacgtattcgacaacccttcggcgagcaagacgaagcagcccaccaagccagtatcgtctggaaaatcgtctgcgtcgtcgaccgtcatcgccaaggatcacgctgtcgacgggctccccttcatggcacctcccgttgcttcgtcgtcgacctcgtcagcagcgtcagcgcatactggtccggttcgagcgacccgcagcaaacctatcaaatcgacccccctgacaaatagtacgagcgtctttgccactcagtgcttgcctcaggtccgatcgcccccaaagaagcgcaacctcaccctcgctcccgatgatcataccgatatcaccggtctcaccggagctcagaatacccctcctatcccctcttctatcgattcgatcacggcgtctgccatcgctagcgtcgaaaaagccggccggctggccaacattcaattccgtcacaccgactcgtacgatctgaacatcaagaagaaccgaagaccgaggttgtttgggttcaccgagatggtaccggatagcccggacgagagttcagcctcggcgagcacgtctaggacggtatcgagagaagcgagtcccacaagacaagggtcgatggagataatccctagaacgaagcggtacaatggttcgttggaaaagacgatcagtacgacgccccgtgggcggtcaaggaacgatgatcaggacgtggccaaattggacgaaccgcgaaccgcttcacaggtggacgagaagaaggaggtgcctgctgcgacggcgttgaccgtgaaaaagtctgtcgcggtcatcgaatcggcgcaggctcagccggtggcacctgctgttacgctcgcgagaaggaccagtctgacgcgatctcaatccgagattggactcaggaacctcgcccctattaaaccgattcgacctgctcctctcggcagtaggacttcggcacagcgaaacgaatcggcgctcaagctcgacttgaacggcatcagggaaaccactgatagaggactcggaagcgcgcccatgtcgagcctcaacgggccttatagtcccgcgacggcacttttgaggaagaaatccggtgaagtggtcaagcccgccttgaaggcggtcagctcttacggtgacgtgactctcctccaggacggacccctcagttcggcccgaagcgtcccgacgacgcccggcgctccgaaatacgtccactttgacacgcagcttgagcgcgtcaagctgttcctgcacgatcagaagccgctggtcgtcagccgaaacggtagcccgactgattgcaccacgtcagagggagaggaataccctttcccccacacagacgaggaggacaatggcgagagccagttgcagatcagactacccaactttcctaccgtacagccccacgacgccgacgtctttctcgaatccatcttcctcgatgacgatcgcaagaatctcaagggaatcatccgcgtccgcaatattgcctttgagaaatgggtcgccgtcaggttcaccttggactggtggcaaaccaccaacgagacgtcggcaacctataaggattcggtacaaggcggcaagtacgaccgcttccagttttcgctcaagctgcaggatatgatgaacaagatcgaggagaagaacttgttcatctgtctgaggtacatggccggcactcaggagatttgggacaacaatggtggcagcaactatcacgtcacttttaccaaagtcccggtcagccgcaaaccgcttatgatcgcgtctagacctagtgcggcacacggagtcggcatgatttcgcccggtatgggcagggccatcggtggtcgtacttcgcaatgggatctcgctggtaaacgccaggacaggatggcagacttgaggatgcatctcgatagactctcggctggagacgacgagcccaaggtatcgggtgcccgcttcagcaacggcgtcagatcttcgccttctcgacaatccgatcgcttgcccagcccacgtcttcgtgacggtggacctgcaagcccccagccactcttctcacctatggctgggcgatacgactttggcgcttcgctcagcaatgcgaggagcggcaagtccaggtcgcccagtggacgtcatagcgaactgcctggttctcccggcaacggcatcaagttcgccaccaacgcttcggttggacctagcatggagttttattctcctcagctttctcacgtcgacttgccatcgcttgcgcgtcccgaaatgcctactcctacaggttccgatcgaactgtcaaacagtcaagtcttcacttggacaccttgcctacccccgtactccaggtgcaagaaccgtctcctcccgtcgactactttagctccatggcgccggctcagaccaccggacccaagcgtagagatactggcgtgccgcacacgggtctgccgaggcagtacagcgagccgccttttcctgtgaacggtcttcgtttctatgacaatacgttcaacgacaacgacggcgaggccgagaacaacgcgcttggcttgcggggcgataatgctgtcagtggatcacctccctctatggccagctcggtcgattccagtgcgtccgattctccagaaagccctgtcgaccaggacttgcccgcgcatcgatcttcgagtgtggacgacatcgccaacatgtcctacaagacgattctcgaacagtgagtgtcagctaaatgattcgacatgatcgagcgttttactgatgagacccttctttcctcttccctagattctgctgggcaggagacgaaaagactgcgaccccgttcggacatcttgaagagcgccgaacccactcgacgaacgatgtcaacaagtacttcgtcaatcacttcgagaccattcaaccggaacaaccggcgatcgagacgaagccggtctcccgcttctcgggcaacgcccagaatatcttcaaacccaggaagcgtgttacccctccaggatcaaagaagagcagtcctcctgggtctgtgaagaagagcaacgtcagactggctgccatctgagcgttttttagatgcgatattcccgcttagcgagcgagactttggaaaaggaaggaatacattaccttgcctacgtgaccccacgttcgaactctacctttcatttcgcataatttggtgttgtaaacctgtttattactgtatcgaatacaacgcatcgtctcagttggctcaaaccgatagaaaagcgacaactcaaacgattttgcgcgtccaaaccaggtgtttgtctttcgaaggttgaggacgttgagtactgtgcgagaaagactcgtcgaacgttccgagagcgctgggacaagcaccttgcttggattccaccacaaggtaagactaatcgatcgtgcgaaacaggtccggaggggcaccttacaagtggcgcaaagtctcaggttcgagcagtgatggaagaagaaaagtggactccgacgaagcatgtcattctgggtttcatgctagttgctgcttccaggttgttctgcacgttctatggaaccgttgattttcggtccagctggttgactgaatcaaacattgcggggccagaaagagggtcgccaactcgaccaagttgtttgattcaagtgaatgtaaggtcgaattggggcgctttcctacgcaaaagagattgaaataacatagctgattgagtgtgttaagacgaattcgaccacccttggtacctgagcaagcttctcgtcgaggaagctgagaggcggctcaagcgtgacctaaagggataggttgcaattgagatccccgtcgaacgcgccatcgagactaccagaaagccccccgccgggcccgcaatcaaaggaactcccgtgatccggtctgaacggatttggatgcagaccttaacgcagtaaatacgtgccagggggacagaatctcaccctggcgagacattcgaggcttgagtaatggagaagtccaggttgtagatcaagctgtcgcatctctgcgagcctagagtcaatttgttctcgtatgaccctggccttccgaatcaggatacgtcttccggatgtaagcttcgatcactgcaaaaaggaaaaatctagctcgtcatttatcgtgatccggctggttcttcaggcgactaggatcgtgaatgcggaagacagaggagcctcgttgctcggttctcattggcccacagcgattcatccatcgagccggcctgttctagggacacaaatgcgctgcctctcgaacctactgtatggacacggcacatacacaaaagatcgggggacggaaatgcttggcaatgcgagtcgctatcaccctttcctttgtgtcacttatgggcaacatggagggctgaaacagaacgcgtttcagttttgggcgacacagcgacgcagctcatatgaaaggggagcgccactccctctttcttgtttgcacaaatggcaagcaacggcgaatcgttgtgggagaacctcacaacagcgctctgtatatgcaagcatccgcttgacgtcgacgcttttgaccatgctggcattgcttctacgtagcctggctttaacagccatcgcggcgattccactcgaaacgagacatgacggagaggaccatgatacctgcgaaatcttggagtatcagggtcacatcagtttgtgggacggagaccaaccggtttgcctgaccgtagttggtgacgctgtggagaatggcagtctgctcggaacgtaggtccgatggcgctagcgaattccttcagcgggttcttatgcaaacccattgtgcaaatagggcaccttgcctcgccgaaacagatgggaattacaaaaaccaagactggctcattacgagaggggaaagccaactcctgagattgcatggaactgacttttgcgccgatgctggagagtccccagcgaacggctacaagctgactatgcaaaaatggtgggttcccgagccgacattgcctgttgctttctgcttaagcacttcttctctgtagctctgagatcggtcgtagtacaggagcttggttttggtatacggagttgggcgacgaccacgttgccgtcaccggacaaggcaggtcgtacatcatcacctggaaactgacttcgttggctcacaaccttgttcaaaactctcgcaaacaggtcaatgtctcaaccgcaagcaagttatcgatggcgacgagaatgagcgatatggaggcaatcatcctgtccagacgtgagtattgcaggacgatgactatacagaatatccctaatatacacctgaacagttgggaatgttccggtcccgatccgaaccagatatggattacagaatgatgctggcaccagatcacgcagcttgtattgatctgatcgtgtcctggcttgacaacgtcggggccatgagcgtcgaccacatctcacatgctggctcctctactcctccgccacactatgccatatgatgctgtatgtaaagattctccgggattgtatttcaagctttaagactagcccaggccattgggctgggtctatcgaccggttggagtccgactgcccgaagtaccgttctcgctctcgggcaagatgtcataaccgactcgtccttccgcacccgagacaggcaggactcctgttcgctccagagactcttcatgaggcaatgcgatagcgcttggcgcgcatatgataggtctgaccaaaccgttaaagacgaaagttccatatctgtccggaccgaggcggagatcagccaggaagcttgtctatggtctagccatcgagatgtacttacaccaatagagcgaagccagttacctggagtagactgaaaggccaaacgagaacctcccatccgagacttagtgagacgatccagatggtcaaggtccggcacgtgtcgatcgtcgatctgaagcaggtggtagtcgaacatcagggtgagttactgttctcggcttttagcatgtcgtaaacctacctagctgcagcgctgacggctctggtcacagaaaggcccgataagttgaaaagggcgatggacacgcagattgcaaccgagatgcctgcgatctttgggtcgttgacgatttgatggtaaccgagcgggatgtcaaagtagtccgacttgctggcgaaaagcaaatggaggatgggcatagcgatgatgatgaggaggaccccgaaaaggccttctagaccgactgcttgctgtgccgcggatcaaggtggacagatcggtcagtggcgtaaatactaagacatggataaatatcacttacgagcggttcaaccgcgtatgtcgcgagaatcttctcttcgatgacctaaaggggatctttcgcacatcaacatatgtgtcgcccggagagccgttccccgcgcccgggacctacgaattgagaagcggtaaagatctgcgcacccgcaatgaaaagcactccgatgaaaaccttggctgggtcttcctgccccgccatgtttgcgacagcgacggcgacccgcttgagcaaggtcagaccctggtcgccttctggtgtaatagcctttttcaccaggctaccagcgagtcctacaagggcgactccggtagtgacgaggacgagacagacccattggtatgcgtataatttgcgacgtaggaagatgacgctaaatacgccaacccagaggacgagcagaccgcgagtcatctggtagatcgagacgggcgtatagatgagaccgacgttcatgagcgtcgtcccggtcaagtcgcacatggtaggcaggaggaaccaaaacttggcccagccagccagaggaagagatggccgatccacggtttcctcggatgatttgatcggcggtctgaccgtctcggacgagaccctgtcttcttcctgtgccaagggttcgtaggcgtctgtagattgaccccgaaggcgtgcgacgtagggctgaagggcgaaggcgaccaggcacatcatctctccgatgaacatgctttagaaggaacggacagtcagatactcctcaaacggtagcgggcatctgatcactcacttgagactttgccagacctgcacataagcgaaattggtgttagcgtcgcagccatacagatcccgtcgttgtcttcacatacgggctgctcgaaattctgccgtcgaggatcacctggactgcaatattcgacgcaagttttgtcctgcgatgccgtattcgactgatcagaacgatcggcccccgacagactcgagaagggaaaagacttgcctgatacttggtctgttttcggccagcgagaacggaatgacatcgatcagctagaacaccttggaacatgcgaacaggaccacgtaccagcagagaattcgcactcccgctaatcaacatggtcagaaccaataccggtacggcggtcgtccgggacgtcatggtaggacgagtgaacgaggttcgagggggatatgccggttgggtctcgagctggaccggggtgtctcccggggcgggtcgagttgaagatgatatgatccgagtctgtagtcggtgctctaccctctgtttcgtgcttgggtgaaaagcgtgatgggttgtagaaacgaatgtatcatgtggggggatgtactttgcgaggcgagcccattcatcatgcaaccctgggcaagagtccgccggtcatatccgatcgacaaagcctcgctcgcgggggttagtcgaatgatactttgcccctagacatgctcgacatcgacatctcgattgatctttgcacaagcacaggtccataacgtagcaccccagggaaacaatccaacgatcacagcggctgattgctcaattttgttcagatcacatcgatgtgtcgtgaacgaacccctttggtctctcctctgtggaagagtgtcactaatgtgtgtgtgcgtgtgtgatggcgatggtgacccgttgaacgttgtggtcaacgaagagtccaagctttgaatcgactagaccgcccaagctcagctcatgaccgagaagtcgtcaattgcctcgtaacagcagcggtgcatcatgtatatcatccttatctttctgcaaaccttttgatatcatactggccaatatattctaccgtcgggaaagctttccgtctgtcaagttctcacaacggtagatccttccacgcgcatcatcacggtaggttacgaactctaacacccataagtcggacgcagactgatccagtaaacacatatccaggtcctttcaacgggattcccctcttcctcacctctacaaagtcttcgcttcgcccatatctaacatgtcttccatccgctctggtaccaacacaccatcaatggcgaacggtcggcggccagcatcggcagcgtcctcgtcgaacggccacctcatcctcaagagacagcttatgggtgagtcgagcgcccatcgccgccccaaaacggacagagtcctcgacagttcctctcctccggtcgagagaaaatgaaggaatattctagactcggatagtcatcatcgtgctgaccatctcactacgcttttcgttcgcgcctaatcacccctatctccagaattgcggaagaagccagtcgatgggttctctgcgggtctagtggacgacgacaacctgttggaatgggagatcatgatcatggggtgcgttacccctgggacttcctgcacccgaaaatttggctttgcggaatatgcgctgataccccgcactttataggccggctgatacactgtatgagggaggatttctaaaagctcgattgacattccccgaagtgagaccgagatctctctgcgcacacagtatagccagagaagcgaattctgactgattcttctcacaggaatacccattgctgccacctaagatgcagttcctgaccgagatgtggcatcccaatagtaggtggcaataaccaatctagatgttggatgtcgtagctcatgctgcttcttgcatcccgcctcgccagtctttgcggatggcaccgtctgcatttcgatcttggtgagtactgtcgatactgtcgaagcacccagcgaacgccggcttaccccgtggccattcgtagcatgcgcctggagaggacatttacgggtacgaggatgctggggagaggtggttaccagtccattcggtcgagacggtggtgagtaccgctagcacagaatgaccacgaggcccagcactaaacgagttccttacccgaccgtatcagctcatctcagtcatcagtctattgtcacaagacgtcccggacctcaactcgcctgccaatgtcgatgctgccaagcaagtacgcgaggactttgctggtaagtagacatttaggcgttccgcggtcgatttctgttgttgaagaggtcttgacaccttttattaatcaacaggatacaagaagaaggtccgacgtttggtccgtcgatccgctgatgaagcatacgactgaagagagacacgcagggtacagccagccgagtcagtctttgcgcgagaatcctgctcgccctacagcacgtcacggtacacctcgatccatacacgcatacacacacacgtaaatacacatttgcacgcagacaatcatgtccttcggcttttccatgtatcaacccgaaacagcctcacgttgccggccggaagtgtacctgtccccggatgacgatgttgatgatgatgacgatataacgactatactctatggaaggcgaagacaccggaggatagatcgctttctaaccgaaatttgattccgttcaacaccgatgatatcggatgtttattcatgatcatcactctccgacctggccggcctttagacgaccatcatgcatcatgcacaagccatgcacatctatgctagtcggtatctctaagaacggtgcccgtgagcgtttgggtaatccacaaaacagtcttcaacaatcaaagccaaacatgaagccgctctcgtcagctaccctccccgcctgcccttccggcttggcgatcttcgtttcaccgttaacgatcctgccggaccttgccgaacctcacccagccacgatcatcgtcgatcagacaacggggaaagtcctcgaggtgattgccggagagcttctacgcgatgagaggtcgcttgaccttcagcggtatggcggactcgaggtgaacgagattgtcgagataccggaaggtagagtcctattgcccggactggtcgagtgagcagtcaccatgagcagctcgatccaaattcggagcgcagcctattgatcaccgcgtaatattgtagtgcccatgtccatcttaaccagccgggaaggacctcttgggaggggttcacgtctggaacattggcggccatctctggcggagtaacgaccgtggtcgacatgccgctcaattcgatcccatcgaccacctcggtcggagctctggaggtcaagatcaaagccgcacgttatggatgggagaattggcaatctctcgaagcagctcaaaagctgctaggcggtgatgccggcggtaatctcgacctgaaatccggcatgggcatcggcgcaggatggggtgaagcacgagtcagcgaacaggagatgcacagtcacgagaacccgaaaggcacagtcagcgtcgatgaagcgctcgaggtcaaggattacgatccggatgagggtgacgaagccatggcccgttcgcatggcgatgatccagaacagatcaagcgattcaatcgtcgcaaatcatacagcacggacaggctgctcgatgtcctcgggcccacggagagctttgttggtgacaacaagggtgtatactgcgacgttgcattttggggcggtctcgtgccaggtaacaaggtaggtcgccaatcgccgcaacgtgactgcgctaaatagagactgaatggcgatacttcgcttcctcaggaccacctatcccctttgcttcgagccggtgtcaagggcttcaagtgtttcctcatcgagtctggtgtcgatgtgagtcaatccgacatagagagctttcctgtgttatgtatcgctgagaatttcgtgtttaggaattccctgctgtgtccgaggacgatgttcgacaagcgatgattgccttgagagtgcgtcaaagatcgtctaacaagcggacagcttgagtaaataatgaagtttcttttctatcagggctccgacgggctcattttgtttcacgccgagatgggagagccagtgcacggtctgggagacgatcagacctatcaaacctttttaaagtcccgccccgaccagtgggaggtcaccgccatcgagaccatcatccgccttcttgacgaggaagccgccgacccaaagatcgtgaaccccactcgtgcccatattgtccatctggcatcagcccaggctctccccatcatcgctgacgcccgtgcaaggggccttccgctcacggtcgaaacgtgtttccactacctcgtgctatcgagcgagtcagtgcctacagacaatcacctgagtcataccgaatacaagtgttgcccaccaattcgcgaggaatcgaatcgggaagaactatggaaggctttgcaggaaggactgatcgattacgtcgtatcggaccactctccctgcatcgccgagatgaagaaaggagggttcatggacgcttggggcgggatctcagccttgggtttgggcattagcttgctgtggacagagatctgcaaacggaacgaccgaggcccggatactgagaagcggctcgcaatggcagatctcgtgcgctggtgctgcacaaacaccgccaatcaggtcggcttggcggggcaaaagggtgtcatcgctaagggggcggacgccgattttgtagtctttgatccgcaggctcgtttccaggtcagaacctttgaatccgtttcttgccaagcattccgatactaatcgtttgctacgcttcaggtcgatctggatcatctcaaattcaagaataaggtatctccttacgtagggaaagacttgcggggaaaagtcgaacaaacctatttgcgagggatgaaggtttacgatatcgggcaaaaaggccagatcggcccgagacgaggaaatttgatctgaaatggcattaacacaattggcatgattatttaacaaattacattgaatgtttctcgctagttgccatccattggggacagtttccgcggtaaggaatcttcatcgggctcactacgtccatactctactacaaggtatacagttcaccaaggatcaagaccacccgtcaagatcccatccgccaagctcgtcttctccctcgtctatccatattgggttatcgatcgcgctccctttggacccttgcggcaacctcacagagatgggtagcatcacgcgtcgatggagggataattccagattgagctcatccagggtatcatccatagtattctggctcaagggatcatcttcttctgacagctcgtatttgaggaactgcgggcttggcagtaggcgttgcgccggcggaggtgatgtcacttgttgttggaacaccggtagcgaccgaggtcgcacgtgaatcgtatctccagccgtacctgtcgaggcccgatccgtgttgtcgtcgacagggtcttcgtacgttcctgttgggtgagtcggaagaacctctaccatgtcgtaccatacgtctggggcggcctccgcctcggctaccacgattccgggcaggagtccagcatcgaaagcgtcgcggcattctacagcatacgcagcagtcacggacggtcttctggaccgactttgcccggcgagatcaacggcatcgaacaagttcggcgcggatgacaaggacgaggacgaatctctgtaagccccattatccacttgtgagagtgaagctggtaacgataggaccgacaaagaagacgctcgagaaccagagtctgggctcggttcggcctcgcctgggagattgacggaaggagggcggctttcatcggtctcttcctcgagatagactgcctcgtttgcttcgcttggctctacaatgagctcagtagcgtctgcaagggatgccatctcaacggtttctggtggctgtgatgtgaccggaagtaatgggcgggggacttcgctgtcgtaaaagggaggagagacctctgcagcttcggcccatgccgagcgtagattgacagtcgcacaaaccgactcggtctcctgtctgtgagatgatgatgagttttccatgccaagttcggagccactgcaatctggcaaaagtgacgttgaagcgactgcgttttcgggaaattcgatcgagcgcgtgtactcgcgccagtccacaggcggtgccggcaaatcgatacaacactcaagcgggcctcgctcccccttcagcgttgatccaggccgtgacccgcgcggccggcgaatgctcgcccattgcacatgagcaccccatctttccggtaccttaaccactcgagacgatcgggagatatagggcgtcgtgatctcggatcgcaagaggttctggtcgatccatgcagtggtaaactggtccattgtggtttcgcggagctctccgaactttcgtggggttagcgacgcaattttgggccgcctgcctctccgtgcgcgagtcccgacgctgcggaaagagtttggtgtgcgtaacggatcggccgtggtggccagcaaatcagaacaaagatcgacctcgtcggatgacggcacgatggatacatcagctgacgtcgtagtatgcatatgcatcgtttgatgatcgctcgtttcgacgggacgaagcaggcgaggccggcccaccctgcgtttcttgcgaggcgattcgtccgggtgttgattcagggtgatcgcgccgccagcacatcgtaccacgatgctggacgagccgacctggtcgtcgcgtacatccacagcgtcctcgacatggtcgtcgctgtctgctatgagtccgagctggtcgcaatccagcttctcctgtctcctgcgtcccgcctcatctctcagaaaatcatccaactcggcctgatcctttctagacactagtttcacaggcaaggaggatatgtctggcagagcctcggcctggatttgcatctcgctatctggtccccaaaaatccaggacgtcccagtctccctccccgctttggaacgcgctacctttgagtctgttgagcaccgcgtccccagtttgacagatcctgctgtcgtccagcatgtcatcctcttcgtcctcctcgtccgaatactcgtcaccccagagttccagcgattcttcctcgtcaagctcaatcttttcaccgcgatgcagtgtatcgccggtcacgacgtcgatctccagatcgtcttcaacgttgatggctgtatatcgctcagcgatatgctcccaagatcgcaaaagatccagagactttttgtacctgtcgaagtggacttcttcataaggttgcatcgccgctcgatacttgggatgggacgcgagagcttgaaaggatggagcgagctcagacgacccaaagctaggcagggtcggtatgggaaagtatttgcccgaccctgtcgaaccggcggtccggtcgatagatggcggtaccgagctcatcgtagcgaactatgcattgcaagactggatctagatcggcatgccgtgtacagttccgatatgatacgatcctatcgagttccggcggactagttgaatacctgataacgaaatgacgatatgatggaaggaaccgtgtgtggatgtcgagatgaacggatggcttgaaggatgagaccgaaagtcgcgaagcgtacttgagctaggactactcgtcgtcgtcgtcagcttgctcgtcgtgttcgcaagtacctagagtagttgatagtttagccaagaagagcgagttctcgattcatatcatctgatgacctccattccatcgagcgagctttcgaacacactcgggtgttattactgcccgcaactcgagcccaaaaactagcagcagattagcggtctgtcgtcgttccatcgcctagaaacctcaaatttgcccacctccaacgactcagcacgggattatcagcttgccttcgaggcgtatcgaggagcagcataagcctgaaggtgtcgcatcttagaagggaatcggagaggtagtgaggtttttagcaagatgcccatcaagttttgtgggcagtggtatgtccgctgtccgtacgagaacccggagcatttcgaaagctcactctttcctggggcacgctttcaatcacagtgcgtctctgctctatccgaaggtgcatccataacggacggacaaagctacagaccgtcagtaatctgacgcttcctctatcacttgaatcaggccatgtcggatcggaaactgcacttcgaatgcaggcagtgctcgtttctgatgaccgcgacaaataaagaggactatcagatcaggcgggacgagctattatcggttgtgaggtaagtcaaaacaagcctttctgatgacaagtcgactcgtcgaccgaactcttgagacgatgttttagagagaagcgaggtgtcacgcaggatgtcgagctcgatccaaccctgatgcgaagccggaaacagtgtcccgtctgtcatgcagaatcgtgagtgccacgagccggacgacccggttgaagaaatctgtccgaccgtcacgaaccgatccacagagcggtccagtttcaggatcagtcgaatgaggtcatgagaaagtcgacgtcaatgtaagtttatgcatggccatcgtcacgcttcgagcccttgccgacgtcggtcggtcgtaggattctcttctacaagtgcctagcttgtaaatccgacttcgacgatgaagaatcgaaagagagcgccaaaaaagatgagcagcgtctcgcacgagaggagcgaatcgcagccaaaaacaaaaaggggagcaagccggacgccaagccagaaggcaatgccatgcaacaggttctagctgcaaagcctacgcctgcccaggggccacccgcttccattgcccagtctggtaccggcaatatgggtgctatcgagatggtagattcggacgacgatgattactgatcgagaggaacgcggtcaagcataatattcttgcatggaaatccgctcgtgcgtcatgttgtataatcgttcgtagttattcatcaatatcgtcaatactatcatcataccaaaagttgtcgtgttattccctgtttgaatgaaagagggagttgcagtccgtatcaactaggcgtctcgtactcgggtcgtcctctatcgaccatttcgcagagtagaagtgtagcattcctggcagaaaggttctctctctacaggaaagaacgtgccattggggaacgactcgtcgcattgctgtagatgtagcgattgttgtcagttctgaagcttggtataaatgccgagcaccttaaggcttactgtgcagcagaaacagtccttgtgccattttactcccatcgctccaacagcttgatctcgaatcggcttgcggcatcctgcacacttcggtctgtgtagcttgacgtcgcaatccacgcagaaagcatgtttgccattgatgacaaactctttcgttagatcgtccgactcttgcatagaaccagtaccattgttgaattcggtcccagccgatgacgacttagacggatcaaggaatgggtcgccgcactctccgcagaagaagtgaagctcgtgataatatcgatggcccagcgccgtgtcgtcaatcgtgatgaagcgcgaatccacaattgcagtctcgcaatagtgacatttaggcgcgaataactacaacatgcgtagagcggtagtcagcggtaagaaccgaacaacacggacctcaagctgctcacatcatgatagtccatatgacagtaagctttcccatcgtgttcgtaactgctgacgtgttccagaagcgttcggcaactggagcactggaagcattcgggatgccaacgcttgtccatggcggagacgatgcggccaattatcgtattatcgcaccgcgcacagaatatgcccgggatcgaccgctgcatcgcttgggtacctgccgtgtcaacccgaccatgtggctgatcatctcctggtatgactattatgggcatctccgggaaccctactgggctcgcgggatcagacgctttgtcgtcgcctggtaacgtgatactggggacattcgaagaggtagcatcgaactcatggctgggtaccatcgcgactgatattattggtatggttgaatatgcgtatgaaggcatcggcgaagaggcccgatcggggctgtcaacctgtacgactgcatggctagctgaattgatcctgctcggcgctttgacgacaggcgtcgggacagtgattgggggcgatccaacatctccgtcgtcatagttctgatccaggtgatcctgaatagtgctgtcggatgacttttgggtcgggtctcgcggctgctccgttgattcaatgagcgcatggtcgttacgcagtggttgcattggcaagatggtacttgggcctctgtccaaactcctgcttgtccctactgagacgggcggcgttggcaagggccgctctgtagattggcataagccgaaccgatcaagggacttgacagatgtaacagtgtcagacctcgcaaacgagtctcgtttccatataggaccgtgatccaaaccacctaaaatggcatctgttgtagagttgataggggaagtagcagaagccgactcggtgggactgctgagagtatgcgctcctcgttgcgtaaaaggcgcaaatgtgggtgacatcgtctttggtttcggaagccgtctcgatccattttgagcggtcaaggcccgcgctgcggtagaatcaggtgtgccagattgggaaccagccgggtcctctttggttttatacgcgttcgtcggcagaggacgcgatgccatcggttgagcatcttgcaaaggcatgttttcgctcggagagagcccgcccgacatcgtgtttgtctgcttgaaaggtaccggcaatggtcgtcgcgttgcgaacttgctcgatgtcgtgctgcttcccggagcaatgtttgcgggcgctagtgggataccaactcctggcaagactatgcctacatcccggccgagccaacttggtgatgcacttctggacgatgtcgaagaagatgccggcgtttcggccaagattcttggtccatgcggatattcctcagtctgtgcaatcctagccgggaaagactctggccttgaatcttccggatctcgccattctcgacctgctgcagcggccagctgcttttccttgtctctcttcctctcctgaaaggttctgaattggggagtttcgtaaacgccacttgcggcgggagacgccactttggcgacccgattgtattcctgagatacactagcctcctcgcctgatgtgaatctggcgttattgcgtcgggatgacttagtcgatgccaacggatagatagtcggatgaagcggggaatcaagcggtcggactactcgaccggccccaagtctcgtcgacctggttctgctgggcgaatactgtagcgtcggttccattgacgtcgatagaacggttcgatgacacctggtagttcagtgattatctttcaggctccgttgctcgattggcgttcacttgctgctaagcgatatcatctgtgtcgagtttgccctttccgaagcttgagtttctgcgagtttctgtggccagaaagcaacaactgcagaagtgtcgaatgtgctggatccaaccgaaacgcgagaatcacaatcgtcacactagaggatttccttgaagttagatctatcaggctgattagctgattacagaatgcccaagcgctgaatggacgatataacgacagcataataggtgatccgcatgcatcatttgattgatctgtttgggatgtcgaggttactcggtcgactgcgtttgttgataatgtggcgaatcttattacgtaagctggatcaggcctgtcatcgataatatggtcgttacaaattaacgttgcacctgtacgtaggtaatgaatgatacaatcaagggaccgtcgagaggatcccgacttcgagatgatgctcgcatgcaagccgaaggaatgttgggagcgaagcgaaaccgatgcaatactggtaaatcataggactgcaggagacccgccatcagctttacttgtcaaattcagcttgcagacgacttggctctggtttcttacagtattccggtagtggacgtttggcagggataccttttacgtcctatgaacatgaccaagaagaggtataagagacatgctcgatcggcggaatcggttgactcacgtgaggcgcgttttcaaagactttgtactcctgccgtaaattttcgtctagctccaatattgaagcaacatttccacatctaaggttccagaatgagtctgtcaatcttggtaatagagtccagattcttcgtcgaagagagacttgcctataacaatagttcggggcactccaaaccgtaacgatcttcctgtcaaacatgagtttgtacccttctagaacgagctgatgagctcgagcaattaactcgatatcgttcgcgtggttgaaagccttgacaacatctgctccgaagagataaccagcaccgcggggagagacaccccagccctcgatgtctgaggttgagatgccgcttctggtttagcactgcggctgcagtaaagatgggtgggaggcagactaaccatctggatctgaccatagcaagtcgcacatcgccccctcatgtggcacttctatcttgcgatcgattatccggatctgttttcctccgcggttgtcagccctttagatgtttagacacggaacgagcatgtgacttgcctgatccagagtgccgagtgctggactcagacctccgtgcacacagaatacccgaccgtctaccacggctccaagactgagatagtcaaagacatcgcagcaatacctccagacattcacgctaccatattttctttggcactcgtcgtagaaaccgtacacttgggtgatctgtctcgactcgtggttgccgcggatcaaggtgatcctgtctggatagcgaaccttgagaagcaggagaagcagaaacgtctccaccgaatagaaacctcgatctacgaaatcgcctgattaaggaggtgcacacagctcgaatagtcaggggttcgatcgtcacccggacggctggaagtcgaagcagacttacccatgaagaggtaatttgtctcgggacagtcgcctccaaccttgaagagctccagtagatcaaagaactgcccatgtatatccccgcatatctgtgagaaagaatcagcttgctattttgtcgaagtcggattaggattccactcactgtaactggactatcgacatattgaacattgccttcttcgataaggatctcgcgagctttcaggcagagatccttcacttgttgctcagatataggctcgcatctcctcagctgctcaatttgcctggattgttggagaccatcaagcacaccatagagacgaaggaggttagggttagtgccaaacgagctcagtaagcttcgttggcagtaacgtactgatctaggtcgctcatctcggatcgaccttgtcaaggcgtccgcagtcgctctccctggagtatatccaacaacctattcgtatgggcaagctggttgtaccgatgtgtatgtcttcccactcgttgcaatcgtctctgcgccgctgctgagaacgctcctggtcgagccggacggctgcgaagagtcgtgggacggcgtcgtcgctatagacgctaatatgccgaatccgcctttggtctcgagcggtaacggatcgcaagtgacgacaaggttgcacaaaacgaagatatcaaacgggcaagcagttcaaagctcaaagagacgattctcggccatggagttggtcgactacgatcctacgacttgcagcaggagtgttgggaacatgccgaatgcatattcatctaagcgagacgcgacgcgcgagcaatcccgtcgcgcccaaggcaagctgtaggttgaggctatctagttgccttcaccactttgtatcacagacttagtggcagctgcatgactggtggccggtattgcactctatgtatacatatatcgctcgagaagccgcaatctgaagtctttgaccgccgtgtgcgaatactaaagcccttgtcaaccgcttgagggcaagcgttgctgataagccttatcgcagatccctgctatccgtttcctcatccacggtgactctgggcgtgggcgaatgcgtgaacgattcatgataagtcggtgggatctctccactagcctcggattccggttgggcttcgtgcacaccgttgccgtgcttcgactctgcgattggatggtgctgcggccggcgggcgtcgtcctgatagatctcatccacggaggactggtgagttggaactgtagggggctcccttgtcggatctgtaacaagggctgcgggtataccttcgatactttgattcagactcgacttgttccgtcgaaaggccgatgctgagattgtgcgctgtcctgttccaggattgaaggccgtagttggtctactcagatcgggagagccaatgggagtatagaaggcttcacgatctgccgtggcatcgagtgtttcggtctgcaagcccgggttctggggcaagatctcttcctgcagcggcaagttcgatggggacgatgcgtgattacggacaaaatacgctaaggaagacagatcagagcgtaagctagacccttgagacatggtaagaccgcacggatataccgaccagtgttatcgtaaccatagttgaatcctccagctgttccgtcacccgccggatcgccgccccggcgtacacctcttggtctgtccatgatactggtcttcgtttgggcttgaagctcgcttgtcgtgagttgatgatgcgtgggtgagtctcgctcgtcgtcgactagaggcgtagtgggcgggataaagggcaagatggatgaccgattggcctcagactgctcgaggcttgatccttgctgcgtgtcagacatcttcgattgttccagcatcaatacgtcgcgccgaacgccgagaccaggccaaggtttcccattggcagacgacgacgccaccggcatcgaagaaagaacctgggtgacgaagtttgcgtcattgagaggggacaagtcgtcctgactttccagtctctgcggcaccaccaaaaacggaatgagctaactgccgaactcgctcttggttttagcacatacggctttcatgtcattgtaggcacattcccggcccatgatctcccggatgatcttattgctgccaaaggcatggaagattcgcacatcatgggtacggaatagaacgttgtcaactctcaggaacagtcgagaaagaatgaaaaatgagtgcggcatgaccctctgggaggaccgcgatgtcagagttgatatgcatcttcagagttggagccgacttacgattcgaacgttcatgaccgattcgccattatcatgcagttcatcctcaaacagtgagacgtcgtcgtagaagataatcttgtccagaaccggatcctggcgagccaacaggtccatgggaatcgactcgctttcagaggacacaaacccctggtggaaatacaaagcagttggaaacttatggcggctctacagcaggacaaaatcactgaactcacggtgaagctgcctggctgaagttcaccagagaagattgtagaatatgtccaatcgaaaggttttgtaggcttgtcggagatgggaatgtctgataaatagctagtgccttgagttctgtgatatccggaacgacttttgcgttagcatgggccataagcaagcagtccttactttccttacctgttctgactccaatgttcggccatcgatacctgtacacctcctccgttgcgttcttcccacccttcaccagtcggaactgccgcaagggcagccagagcggagaagcttagcgacagtggcgcagaagtctggtcgggggcgtaagtgagatccaacgcattgttaccaaatgtcatttcggggagtggaatatcgaggtgttcggcagcgctggcgtccgaataagaaggtgattagttcggtcgggacgggattctgttccggatgttacgtacgcatcgatttccttgccattgagaatcggccgcttgatagttctaatggtccagtcgcccacagtcagagttcgagcgcttccacgctcgacaagattgtgggggggaggctgttcacgcgaatattgattggtagaagcggtcattgactgtgaggggctgtctactcgagaggtcgaggtctcctgtagtttggtgacagccgggacagcatggactgggaagacatgtttggcgggcatgatggtagcatctgcagcataatcgtcatcgttctcacgtgtgtttgcttcggcttggagtcgctctctctctagggaagacgcttctcttgcttgctcgtactcgtaatcatgctcattgccgaaagcggagctgctgacgacgttcgtctggggtaagggcggagcgagaggatatgcgtcgtgcgacagctgagcgcggacatatcctggggattctggagccgcgaacattacatgaccgtgtccgaacttcgcttcgccagggctagcatgagcttccggcgtacccggcgcgccgccgaagctgcggtaatgcgagtcctcctcgagcggtctggcttgctggggtgcatccatgttcgaaatctgatgttcgccgtggtaatggttgggatcgtcgccaaactgagctgccgtgcgcctgtaatcgtctaccattcctccctgaagattggttgcggaaggcgattgcaggggctcgagcgggcgagaatggggaagaccaggtggtaaaggcttgactaccggagcgtggtagactacatcgttgatctgtatatcgaacggttcaagtcagtccatattgctgtgaattattgagcttatctcactcacgacacgttccgcctcagtagacaagcgttgcgtctgctcaaatccctatggagtcgaatggagatggctgaataacgacaaccagatgtgcagattctcagacgacactcacttcgtatggagctcggccgtatccaggaggagtttcttcaagaggaatctcttcgatcagaagctttccaagctccccgactatctgagctttctcagcaagctcgaaacaccctccaaatttgatggccagagcttcctttgtcgcttgtcgcttgtagtccccaagcttcgcctcttcgatgaggatatccgtatccatctgacgcatttggtcacgaagactctgaaggagttcagtctgggcttggagattcttgttctcttggcccatcttggccagcttcttctcttctctctcggcccggctgccggtctggcgacgtcgcttcaggagatcctccaagctttcctctcgagtacggatgttcttcagcaggaatctgatgtctcccgatcgagccgcataggtttgaagagcgtggccgaggtgttgcagaatcgagtttgcatgggcgagaacgtcagataggtcagatccctgagcggctccccaaagggcaagggagttgcctgcttgtgagatcgagttgcccaaccgctcctcgctctgtatgacactcttttcattggttatcaggtcttgaagctctcgcaggttctggtttcccatcaagctgggcaactaggcgagggaagaagagataggatgatttagtttcattcagcagcatcggtgttctggccgcccccgacttacgatcgtagtatgcgcaatctttcccttgacagatttggcaagatctccggctcccatacccccgccattggcccctgctccaccgctagcaacacgaccgtgacccgactgagcgggttggtcgccatccttgtcgctattatctttgttcgatctgccgagaccgaggccgaatcgacccgatgccgctcgcatacttcgtcgttttatgaactagtcgagactgagctggaaacgagatgccagtcgctgtcgtgacttctgtctcaacttactcttcactgctcttgaccatgccactcgccagctatgcagcatgatattcataggggaagggtggaatctactctacctccgggctgtgtggcctgcgacggatgcgacggatgcgacggaaaggggaagagtaagcccggggcaacgtcattttggcgacgcggacatctcgttgatcggaggcaaagcaggctttcagctaccagctacgagctaacgtgagatgagaaaacgacttcatgtccgtcttgatcaggatcgtacatcaccgacaaagagttcgagagcagcgttctgaactatcgaacattcaaacacaagttgcatatgttgatcgctcgctcaaagacggattaaacacctcaggcatagacagcactcaaatattttcgatcgataaagctcttagagatgtccaccaacgtagatcgccgacgtattcttgggccagaaaggtcatttccaccggtctatgctcctctcgattccaccgcttcgggttcgaccacggccagtaacgaacgtagggacaacgcagacgtatcaagatcatcgaacgatatgagatctctatgtaagtttcactggacaggtcttccggaaactggccacaagctgaatgtattctacaaccaatgatcagtcatcaagaccgggctcatcagtcaagccaacggcagcggatacatcgagtgtggcgctgtcaagatcgcctgtgcagtgtgagctcttcaccagagatttttgtttcatctttgacttagcatgagtctctaaccactcccaccatcgatctaggtatgggccccgcccgaaaccacccccttattcgcccgagggtactctcaacctcgaggtcaaattcgccccattcgcttcgcatcctaggcgggcacctttgagggcaagcacttccatcggtcctgctcatcaatgattggaaaactaacgttcaggacttctataatcaggacaccgagccccctcacctctctcatttgctacactcgcatctattgccggccctccagctccatactctccctaaatcatcgatagacatctaccttctggtgctccaatcagagtcccccagcgtcgagtctatcttagcgagcggtctgacggtatgcgccgcagctgtcgccgacgccgggatcgcgatgaacggtttaggagtaggattggtcacatctctctcggagagccctattccaggtgccaagccgactgttcagttggatcctgagggtgtccaggcgagagatgctgaagccagagtgacagtcgggtgcctgcctgctctcgattctgtttcagacgtctgggtcactggagaagtcgaggtggagaatttgatatccgtcagttctgtacgccccgcgatagattggccccctgctgacaataagtgcgtgtcccagatgatcaacgtatccactgaagccagtaagacggttcatgccactctggctcaggcaatccttgaaggggaacagaacaaaaacagttggatgtctacggctggctgatgatgagacgcaggacccattgacatctatttcgggcaaatcaagcgcacagaggccacacagtcttgtagccggtgattgctgtggtagtatctcaagtcatgccatgatgtgaggtatgcctagttcggcacgactgctagtcatcctacccagcccccgctagtgcacaaatatacacacttgatccgtctttttgcttccggttcgctcgatcgatctctcctcggcgtgcatcttacgaattgctgcaactgtatcatgatcataagccggtttttaacaaggctacggttgatcttccaggccctgaagctggcattgccatcacgcaactggtaccgtctctgcaaggttcatgctccctggacccgatcgtgataggcacaatctgcagatcatcggttctcggcgggctatccgaagtgcgacactatgaaccatgcagattcgacgtctcgtggagacaggaataagcagaagcagacacgcaaagatttccaccaatcacaccgtttagctcctccttcgataaggtttccttcgtctgctacctcatctgtcgctcaaaagtctgggaatgggggcctggactctggcgacatagagagcggacagtatcatgcctcatcgagcgaaagggctccgcttttccgaacaggccatggagaaggggagggacggcctggtctacccaaactgagtcgggaatgcctgtggtcgtgagtgtgtaaaacagcctgagtatgaccgcgctcactgagtcatgatgcgacctcttcgcagggaattcaaatgctacggcagttatatctttccggtcctgctcgtctttggggtgatagccattggcattgctctaattgtatattatgcggttcgcgggtagcgatagcgtctcgaacaagaggtaaatcagagagatcgatcagctccgtcattatcattattgtcgaacgcgatcgctcagctgcaagtggacaagcggctcaaccctctcgactcgatgtatgtatccttgcgataccatcgtaacaactgtatcgatcggacagcctgcgtcactgctcaatgtgggcgaaacccttgaagagatcttgtataccgttacactgagaattcagctacatgctacgagaagtggggcgtcacgcgtcattaaacttcgacgccaatcatttttggtattgcccaatctcattcacggaagtcttggtcatcggttcgatcatcaaagtctagattggagatccacccattcctgtaaatgcaacgcaatggacgtgagtaggagcactaggccgccgcccaccatcgttggcgcaaggaagacttaccagtaacgcccacggcatcctgaatcttggcaatctcacccgggctcagcttggctctaacaccacccaagaaagcgtgccagcatccgtcggcctcttgatcgctgatgaattcactctgacaaagggcatagacctttctccagaactcgggatcggcgatagtgttgtggaactcggctgtggagttggaaggtcctggtccagtcgcaggatttgaaatgtccaaggtggtgacgggacgtgggggaaaggccgcggtggaagtagtgccttcagcagcaggatcggcgtccgaaatcgtcagagatgggatcgctcctggaggaggtacaggttccttcggaatcgaaaccccggtcgaagtgggatctccacccagttccgacccagtctttggcatgtcgtcccagccgggcttcaagaccatgttgacaacggctccttcggcaatgccatactccttgacaagcttagcatcagcgagagctttgccttttagtagcaggcgctgaaactcgggtttgggggccgtcgagctggaactcgcgacattcgccttgagctgctgtatggagtcggacggggcaattttcacgacaaaggacagtgctggcttaagactcttgacggtcaaagagaatggaccttccaagggggaggaaatgacaggacaatcagctcttcggcactatactagggatagccagtcaagggttactattgctgctctcgagagtccccttctccttcagctttggcggctcggcaacgtccatctgatcggcgagtcagcatgcaaaaaagtttgggaatcagcgacccataggaaatcgcctcattccttcatcatctcaccgcaagaactggcattctgcgaggtcgcttctccggaggggtgacgaaatcatccgcatagttgatggtatgctcagatatttgatcgaggtaccgcttggcaaaagcagtctcttcctgcagtcgcgatccggaaatttggtgggacatagtagactctgcaaatcaatcaggaagactctataaacagctttctgtaattgatcatgggctcgagcttgtctacagagcgactgtcgggctatggccttctttgatcgtttgcgtgtgaaaggacgtatcgagcagcaacgacgtccgaagcatctcgcccaaggccgaagggcaagtcgcgacttgtctccgcggacaccaaagacgcgatgacgtgtgattgcgcttgatgccatccatgcctcccttgtcccttcgccattcatcattttcatgaaacgatggccaccactcgaatcctgaacgctgatactgacgagtgcacagtacgatcgtgtcaccacaagaactggaaacttcgatagctccagtacacccagcgcaagcaatactaaacatgagatcagacgaaacgtcgtgcgaattcccgcttctccggcatatgggagaggtgtctgtttcgtcgcctgagatcctccccgtaatgggcatgacagaacttgcgtcaaactttatctatctctcagctgttaactaagcaatcgaaaatgggacttgaatgctgctagtagccctgacgatcctgctggcggggcgacagaggtcagtcaagctttaccctgcgcagaggatctatgagatcatcaccccgtgaactgtcatgcttggtgttcacactctggagaatcacgcaccttagatgtggtcaaactgtgcgagcagtgctcggacttggtctgggtaacggcgaggtcacccaggatgatagttcatcaggccttgtagcgatgaaccgagcgagaccgctcgcactatggcgcgtaagagatctttcgcaagcgcaagtctattagccgatgcataagaggggaggtctcgctccatgtatacagcaagatttcagcgtaaagctatgacatattacaagaggcggttttggaggcgacgagcataggctgatgaatgggcattgatttcttctgttgagagcatagcatgagacgacatcttggtttggtgtcgtttcgtagtttgggaggtacgtctataactccaaaacactgcgactgaacgtcgtcattcgctcgttcgtaagtgcaatttacttgcatgcgattgcctgatacctgatgacgtgcgcggatcacacagaccgcaatggttgcggaattccagctgctcgtccaatagcggcttagcagctacaagccgctgaacaggtcacagtctcatgatcacgaaagcggcggcttttggctttctcacacacgacaaacagtggtaagcgagcatggtatcagcacaatcactgcgcctgttgacataacattaattgttcatcatcattaatggttgatgttttaccggaaggccatgatgtcaataataatgttcggagcatttgagcggacgatggcgccataggatactaatgcagatggatgatgatgcggtccccactgcacgaccgcggctgacaagaagccacccctgattgtgaaccgtcttcgctggtcgtcacgcctctcggaggtttcggcgcctgctagcgggagaagggtctcgccggctgtttctcggagccggctcaaccggtctacctcgaggccgctggtccggcgcggggggaaaatgccgatgagtcgccctccaccttcctttcctctgtgccttcccgccgtcctcacttgctgcttgctgatcgtttttcccattccatcccgcgctgtttcctttccttttcccgcgttgccctgctgccctttgttttctgcaaccgccccacgcccttgtttcccctatcctgtgtcttatacacatctccgagcccacgagactagcgctcatctcgtatgccgtcttctgcttgaaaaaaaaaaaaaaaacctcccatccatcttcccggtcaaacacgccccgaccaccagatcgagacctcttgtcttcatctccacctcgactcgccgagcctctcttccccgtgaccagcaatagcagtggcaatggcggatatacaggcgtctcccagcaggaccagggggacacgtcgtttggctcgtttaccgacgcaacgcccatcacgcacggacaggttccttttaccagtaacagtcgcagcaagacgtccaaagacccattgtccgggggtgttcatcacgacgagcgaggatctgggaagaagacgggcgagtacgacctgttgggtgatttcggggacgagtcggtccaagtccggtcagaggggacttatcatggaccgtcggtgagcttgttatcggggtccaggttgatcccgacgaccttgtacccacgagccgaccagcaacagcaacatcttgtcgatccgaccggtctctccctctcccgacctacccacggcgatgtacagggaagctcgaacgtacccctcggtcaacaagacctcttgggcgagatcgacgctttccttcaagccgaacgacctgaccaagacctcccacccacctcgtcgacgtctccttctcgaccgcaccctcacccgcacccacctccacgccgtttgtcacacttccctaccccttccggagcatcctcgcccccggccatcagccccatctccagtttctcattcaggggcaagacaggccggacttcgtcctcctcttccgacctgaacgccgtccgagggtcagacctgataggtttcaactctaccccgcactctcaatcttactcggacgcccactccaactcgggtgggacgacgacgacagaagcgttcgacgcgtttgacgaatttggagcatgggcttccgctggacctgccgctgcttcttcttcctcctcggctggccctagtcgtcctggtacggtcggcgggtcgacctggacgcatacgagcggggaggggcaaggagagggacagcaagggaattcgcccagtgctgggttcagggaaacgatggagcggatgcgtcggctttcgtttgaccgggaacgacatccagtcgacccgagctcgagcacaccatcgggggtcaacctgggtaggaaacctagttggttgggaaggtccgggatggtagggtctttccccatcaaacgaaaagtctcggccggatcttccggggaaaaggaaaaaggaagggaaaaggaaaaggaaaagctgggcgaagtgggagggtattccgacacctcggctccaacgcacggtctgacggatgaaccgggagcgtacgatgacaagacttccaccctgcccgttccaccgcacgacgacccgcatgcacaggcgggatcgtcctcgaccttgttggcagaggggacgagacggatgacggggctcgtccacgcactgggcacgttggcgaccaagacggcgtcggtgaaaccaaagacgaaatggaggaccgtcatgggaccctcgacgtttacccctccgacgcagggaaggtccgatccctacttttcatccacggtcggcggaacatcgtcgggctcggggaaacccgagcatggagcgagtacgtgggggagacggtcgagcgggttcatggatgatttcaccggttcacaggagatggatcgacccacacccacggcgcaaccgatcgagattacgcatcatacccctttcaacctgggttccagtgccaacagccactcggtgtatatcccgggtaccaatacgatcatccacccgacgggttcctatatgcctgcaccccctactggagcgccaggattcaggaacgatcatactggtggttgggaattcgatcggggccagcggagagacgactggggagggaccaagttgatcggccggagagagggcaccgtgcaggtcctggacgatcatgcacctgatgcggcaagtccccgtttcaccgtatttccatgagcgtttgactgaccgaagagcgctcggatcttagctgcgaccaaacctgcccgcccggcagcgattatcaaatacctggacgttactctgtaggtgccgtcgctatcagcttgtcgaggcttgtgactgacaatcccggtcgcgctgccagtttcgctcgaccaacatggcggctcgttgtcaaccttttatagactcatcgaggcctactcgacgaaacacccacatgccggcaatctcctcatcatcaaggacgaaaacgatcgacgctttggcgtctacatgaacgaatggatcaagcgggtcgaggggacgtacacgggcagcggcgagtcgtgagtgacaggcgccaaagcctcgcatgtgcatcggctgatagaccgatcgatccccgcagatggctgtacaagattgtcggagacgacctcgacgcccgagccaaggtgttcaaatggaccgggaggaatacctactttgcgctgtgcgagtcggatttcatctcgttcggtggagggtgagtggattgccgagactggaattctagacgttgtgctcatcgccatgctctcgccggcaagcagggacggcaagtacggcctctgggtggacaaggtgttccaaaacggctcttcggcgacctcaccagcatacgcaaacgaggtgctctgcgctcaggatggtagcacccaggaaaaagcacggttcgattgcatgggcctcgaagtatgggctacgtcgggatagatgtcgtcgggcatgggctttccattcgcgtgacgtggatgctcatgcgatcgtcgggggttggaattatacaatataatgaagcatcctcttcgcatttactctttatatcaggccatctccgtgtcttctttgacgttagcctcggcgacgatctcgggcgtcggcttttgcaagagactcttgacgtcgactcccctcgccttgagccgtccgagcgctcgctttcggttgttcccgctcttgtcctgtaagacggggttgttcaagtcgatttcagcggcggcctcctcctcgtcctcctcggtctgccattttgggaagaatgtcaggttgttataagccgggatggccaagacttggtcgaccggagctgtcaggacagaatcacggtttagccgaggaagagaacattcgcgtgtagacgcggttgcttggacttacccgttggtacagcaagttgttgcaggtaatctgcatagcttgaagtcacgtcctcgatctaccatttcgaggcggcgtcagctcatggcacccgatcggccccccaaggcgcatgctgattctcagactcacgtctccatcctcccctactcgaacgacccggaaaggcgacccgctcatctccttgatctgctcctcggtgaacccgcccaggtccctaggcggttgcacgacgtcctcgttcaaagccgcctcttcttcgtccatgacgacatcctcggccactggcgctgcaccagcctgtcccttggccttcttcttatcacccttggtcttcttcttggccttgctccaagccgagctgtccaggttgggaaagaaactcttgcccccgtcttgacggtgttcccatgcgggatcgatactgagcaagagtgtccgtgcgtctggatccgacgaggcagtggcggggagtgagcaaaagtcgaggatgggcgctgggagtggtagcgagtggacggccgagaggacgctcgtcggggctacgacgtgtgcgatggggatcgagtgtatcgaagagcatctgttgcgagtcgggaaaaacaacgacgccgagtcagctccacgtttcgttcgttcgcaagcgacattggtccccggcgcagagccgacacttgcccttcagagaagaacacgacggtctcgcctacgacctgcatcctggccacacacaccccgtctccttctggcaagacgtaacccctgaccggcgtcttccattcctcccatgtcaaccccttggtcttgacaccgacacctccgagcgcgtcggccacctttttccgcatggcctcgacctcgtccgtcttgccctcggcgatcaacttttggtcttcgagctcgatggcctgtctgacgcgtttccccccgcgacgcatggtcgtccgtacggtcctaaagggggagagggtcggaaggatgggaatctgacgcatgaggtgaccggtctgccagttatgaacctggatgttcgggtcacctccaccagagaggaggatttccggatgagaagggaggacacagagggatgatacgaatctgcgcgatcgtggtcgtcagctccggagctgacgggggtgtcaatacgtcggacggactgactgtttgtggccgaacaagaaccggacgaggacgtaggaagcggggtacctgctgacccggatatgttcgtcccgatcggcggtgatgacgtggttcccatccaacgtgatcaagtgtgccgtgttggtcgatacatggcctgttagccggagacaaggcgaggagttcagcgcaaggatcatcatagagaggaggtaaaggcccggggtttgagctcacccagcaagagcttggcatcggggttcaaggatgggtcgccagccagtgctacgggatccggcctgacgacgggtactttgggaacgttggcagattcaaacgaatcgtctacgaaagggtagctgggaatgaggaagaagatggtcaacatgcgaggatcacccaaacgggtcgaggagagaaccacgggcggactcacgcaaagacgtccccgttcttgtcagagacgataaccgtaccgtcgtcttccaccgagatggcgctggcctttttgatcagggtccttgattacgattgaccaagtcagaaacgcgggacgtgccatcctgcagaaaagaccgacactccccccgctcacctctcgtaaaacaccttgcccgtctcggcttgaatcagtttcacaatcttgtcctcggtgatgatggccacgacgggttcgaccgactgttcacctcccagaggtttcccatagggcacatagccggtagcgaccagcttgatcactttactctttagatccttttccacttgaggtcccgtagcggctggcgaggcgtagagaggtttcccagagacggcatcgtgcgtgagagtctgggtggacgcgatgaacgagatgatgtcttctgacgccgataaccggacgatcggtgccggaattgagacgggtgccatggtatgtatatcccagaattggttcgagattccgtaccagttccctgataccttttacctctgtcagttggctgtgttgatgtcgatcaaacgagtttgtaccatttgaatctcttgtacttggttgacttttacttggttgaggtggaaataaaattgaaaatcacaaattacaagttgatcaactaactgaattcaaccttgacaagcacaacttgcaacttgattatcacactccctgaccatatctagactcaactcgaaccgacaaacgacgcaaatatagagccatcaagatgcctcacaaacgtgagtcaggatggcatggccgtgccgtgtgttcccaaggagaaaaaaaaagcgaagcactaacgagccatcgagctctacacaactataggcgccaaacgatccatcagagaagaggagaggaaaaagatgcgagtacccacccccttcaaacctgcgtaaaaatcctccttgacgtcccatacttacccctcacttcctcgctcgttcgtcccgaattgtagcggtttcaacaatgtccccaagacgaccaacgtcggtggatatgccgaagacacgcccaagggagcttcccggatcctgaactcgcttcaaacccaagctgcgtacaacgagcgtaaaaaagctggcgaggccgggccttcttcatccaaacggactaatacgaacatcaaaggcaaacccagcacgacgaccaagagcgctcctcctaccaccaaaggtgtcaagggcaaggagaccggtctccccaagatcctcgccggtgaatcgttgggcgaatacaaccggaggctcgaggatcatctccgaccagaagtctcgggcgtgatcaaggccgcggcggctgccaaggctcaggcggagaaagctatctggcaggaaaagaaggccaaccgcgaggcggcgaaagaggccaagcggaggaaagaacgtggagagcctgcgatcccctcggataagcccgggaatgcggtcgcaggaaaagggaaacgtaaagcgacgatcatggatgataccgacgaggagaacgatggggacggtccatcatcagcatcaacagcggcttccaagaaacccagaaagaccgagtttgagactctggatcagcgtcgtcgggtcaacgatgtcgtccaggcgccaccccaacttccagggctgaaacgatcggggttgaagaaaccggcgacgagcgcgttctcggcgacgggacggacgccgttgaacccgggtcagaaacggttgatggaggaggagagggaccgagtcatccagcggtatagggagatgaaggaggccaagctgcaacagaggcagactgagcggtgatgcgcagcgcaggagggcgcggagtgtaccatataatctcgccgtcttcattcctgattcaaggtacatgggcgcatacgagtagatctccgcatggtcattaatgttcagcacaagggctcattacggaactggttcgggtatgcggccacgtgctcgtaaatacaatggaaacaaggagtatacgaccggcagaccatggcagtctgagtaaagagcccccaaaaccacagcgcttctttatcgcttggctggaccccccttcttcgccttgggaaagacggggggcgcttgcaagatggctgtcgtcgccttggcctcctgaccgttcatccccaatctctccctatcagccgccgtaggcctgtccaccgtacatccgatgctcttgaagatctccttgatcctgcaggcagaggcgtaacgagacgtcatgtcagtcaggctttgctccacagccaaacgcatgtgctgctggaactcacttattggtgggcagtttcaagtccgttgcgatgggttcgatgtcgcatgcaaagttttcgcatcgcagacgcaaagcgaattgataggccatcagcttgttctccatggcggcggtgatcgtcgggctgttgcgagttgacggccgagcgtcagcacactttcatcgttgagaggtagatgatcgcgaagcagccgcctactcacgtcgagctacccttggcggtctcggtgaatcgcttgaccaacccgtcaatgatgaccttgggcataccgttcatcttttccaccaaatcttctgatcgtccaagagcctttttcatcttttgaaattggcgaatgcaagagatgtagtacagtatgcgactgcgggagatgatcgaaacacatgtcaacgagctggctcacgaaagagccgcgcaaaatttccaaatcatgcaactcacactgtcgatttttttgttccgaaaggctgactgagggccaacctcagcttttgctcgatccatctactgctagagaatggcaacatctgcatcctctcccgatcgtccgaagccttgataatcggatccgggtcgatactggcatactcctctgtcgggatgagcttgtccagaaggtagacttgttcagggtcggtcgtctccaggttggcaggggggtgtcgtccgacagagttggcaagctgttcgagcgcgtctgctcggcatgccccattttcagcatagtcacctctttcgaaatgaccaaaccacacttacctgcagtaggaatgttctgcgcagccacctcgatactcgacaacaggtgatctttgactccagcctgggcctcggcatccaccttgttcctctcgacagccttgattctgctcttcgcctttctggttccaaatgtctctccgagctgatctcgcttcaacatacgttgctccatgggatttgacaggttggtcgttggtcccatgcttttaagtcgtttcacacgctgcgcgaggatatacgtcggggtggaaggatgaactacgagcgagttggtggccgggtcatatagagctggcatgtatctgcaaggttcaggctgacccatcaattccgcgtcgagctgcaaaggcgatgtaaatggctcactggcagttgtagttctcttcgggaatgtccaaatccttgttcacgctgtaaaactccatgtctcccgtctctcccgcaatcaaggtcgcctgtcgagcaaagtcgagctgctcgttcgcctcgtcttcacgtcgatagaccttgaacggggtctttttcgacggcctgtttgccggaaagttgactgagataatgaactcgagtcagcttggcctataatgagcttgatcaatctcctgtgaactcaccccatgcaggaccgaccgaagtggaggcctcgagaaccgagaccgaggatccggatcccgaagcctctggcgcctttcttttcgttccagcgggtgtggaagacattgattatatcactaaactgttctaagagcggtacgagctatgtaacgctagccaggaccctgtgcggaaccctcatcttgagggtcggtatgagcatatgatgttcgttgcgtgcacgtcttctggtcgcgcttgccggaaattctagggcgacgcgcgctttttcgtggatctcggtttcaggtcagaccgtttcggcacgaacggtattgcaagccaataccatcggatacggcgagcaaccgaaaccgatctgctttaggctgatacatactctatgggaataggacgaagaatcgtcccggttgagcattcactctatcggcaagagaatttgtaggccatgatacgcccttgatgctggaccgacagaatggcgaggctacaccttgggtggttccgtataagctaaacggacctcgattcgtattcctgtttgaacgattctttcgttatcaagtggtacgtacgaaggtctccttagttcctatcatctcgcgtttgtcggccgaaaatcgtcaccggcggggcgactgacccgttttaagaatgtacagtctgtatcggtctgtccctcagatgggcgagtcgagcgtctaacattcatcgaggcaattgaccacacctaaaggtgagcgactgttccacccgaggatttcggtcagtcaaaaaaaacaacgtcgtccattgtcgcgttcccccttgtggtagcggatccaccacacggattggtagaaaagcgtagcatgctgccgccaatattaacagttccagtatcatagatttgtcagacatgaatcaattcgtagacggatctcatgcctcatgccattgaccacaaattgaaatattatccaagccttgacagagatgtccgtccaggtccgggatattgatgctcccatttttaaagattatcgttacaggtcatagcacgactcgcagcgctaacttatcagacagatcaatgattactgtgcgactcttgataccatcggaagcttcacgacgaaacacagctgtccgtgcctcgtgttccagatcatgttggcgatcagaattcatgtcaaagagttgagtgtgttttgccagatgattagaaaagatcgagagaattccacctacgcactgatcgcaatgaggaaagatgaagtgacgggtattagcctgctggctagatagacggaccatgacgtggtcacaatctagaccaaaacaacatattgtcatgaagatcatgcgattcagatatatatattattctaaaacaaggttccgcaagggaatcgtcggctttctccgatcggaagctaataccccggaagcagaaggatatgagaccgggaactgtagctgacagctcaactcacttggtcaggtcgttcgtatctgttcatgtcaaccggaacatcacgtctagccctgaggaaggatcaggtttcatattgaatagactcacatgaccatgatcctgcctccacagacctctacgacacaccgcctggtcacactgccatctaaagatgagctctgcaagacattcgtggggcagcctatttcgtcattgcggtcgcccgcagccatcatcgaccggtctatattcaaggcaaattgcttagctatggcgaacaaagtcaaggagaataatcttcgattcagagcgcacgtgaagactcataagactgtggaaggtattgccttgcaaattgaagctggagggaaaacggacaaggccgtagtctgctcgaccatgactgaatgctggcaaattgcggaaagtcgattgattaccgacggtctagtcgacgatgtgagccatttcttgagccatcgaccaattactctgcttataccctagcacgatctccagattctctttggaatgccgatcgctctcgacaagatccaggacgcccaatctctctcagatcaccttcgacccctcaaggctcgattccgcctcatggtggattgtaaaacccaaatcgaggccctgcatcagtatgcggcagaacagaccggtaccgaaaaacgtaccccttggtcagtcatgatcaagctagatgcagggtaccatcgagcgggtctggccactgacagtgaggagctcaaacaagctatccgattgtgcttggactcgccacacatcgagctctttgggttttatgctcactttggtcgtaagtacggcttgtgataatcagcagagcatcaagtcgagctgattgatttcctgcacttgcctcagattcttacaatgctcgatccgaggatgatgctcatctttacctgcaaggggaagtagaggcaaccaatggggctgccaagatggcattagagatggacccggagcattcacggactgatcgaccttacgtgctgtctttcggagcaacgccaactgcacacgtgtcgaacacacttaccacggacaagatgtacggggagctggaattgtgagtctacccgtcttggaatcgatcgacgagttgcccttgcgctgagtagctattcctttaggcacgctggaaactactgctgcctagacttgcagcaagtagccacaaacttgaccggcatcaagaatgtcgccgtgtcggttctctccagggtcatatcggcttacccgcatcgaaacgaagccctttgcgataccggcgggatcgccatgagtaaagacactggaccatggcccggatatggcaaagtagtatcacctgaaaacctgaaacactgggagctgggtcgaatctcgcaagaacatggcattcttattcggcaagaagacgctgcagacagaaacgacctgccagaagttggccaggtcgtccgaatcgttgggcaacatgcgtgcatgatcctctcgaatcacccttggtactatgttgtcgaggacggcggcgacaaggtcgtggacgtctgggtcccgtggaagggctggtgaatatgaaatccatatacatgatagcgcgacatcccttgatggcgcatgtgatttcgttacgaccgcgctgcgatcacagtcaaggagttatttgtgttcgagctactgatttggctcttcgtaatacgttctttcgtgcgtcagaccgtcgtcatggctacattggccgcagccaacagccgccgcaatttcgctttcttgtcggttgggtcgtcatcttgggaagtcgaagccagtcttttcctgccgatgctagtgggtgagtgatatgcataagtgtggtggagtatagcagacgccacgtgttctcttgcgagcggggcggccgcggctatttccggtttggaggcggccaaggcggcttgcaagcgttcgctaagtgatgggatgtcgtcagcgagccgggcgagcggaagatacagaataaaccacagactcacgttgcgctgagctgtggtgcagcagctttgaccggactgatggatttcgactccgctgccggcttgtgacttgaaagtgccggtacagcaagaccggtgatctcgtcacgaatcgcttcgacatcgcccttgtaatggctgacagcgtcttcaccgagccgatccgcatctgcaacttcattctcgggtatgcagatatccagttcagagacataggtttgtatggctccggcgagcaagtccaccagatgtaacgcggattgaataggatgatctatgacaggtacgctcagccatccgattcagtgtcggaccaaggggcagagactcaccctcaaggtcttctgtttctttccactcgtcaacagcatcttgtacactttcaggtacgtgatcatcggagctgattgcggcaaggaagacggagcggagttgtctactcgataggcgagcagttcagttgtctataccggccgaataggggctagcctcacttacgaagggaattctagtccgctcggacaaggcgtcttggcgaattccacaacaggcagatcatctatcgtgacttcgagaggaacgagaaggtcgcgcacgatgcgctgttgcaagtccgtgagtgattgaaggagcagtcgaatgactttggcaagcagctcaaggtctttagggcaagacggtatgagcaactgaaccagatcatacttgtactaagcgacgtactcaattcttgttgactcagtaacgagctcgctatggcgcgaagactcttccaaagcggaatcatggccttcaagactccatccgtactgaaggtcttgattgggactgtagcaacttctggcaaagcgtcaaacaggctagcatcgaaagcctggtcagacgcgtctttggccaagcatatcgcatgatgccaagcaaaggcggattcggtttcggccagattaagctgatgtaaattgaaaagtcggcgtcagccgggaaaatgtctatgctgggcaggactgggatacttgcagatgtgggcaaggtctgacgatccgcatcgttccaggtgatgaccagaatacctagctggaaacgtctgcggggaggaattttccgcacaatctccctataacgtcgttgagtgctacgaggcggaaggaacttgtcagcgggtcgtcacttggggaaaaaacgacttgtccactacatactcttcaagttcggcaccgcattcaagaacgatcagcccaacatccgcagcccaatccgtttcgtcgtttgtattgaccgtcgcgacgatcttggcgtttcggcaagcgcccgagaaattggcctcgtaccgatcggcatctgcgagattgaacttgctgcgcaaccaactgccgctgggtccgtcggtcgcgtcgaggacgacgtgccattctccaaggtcttctacacccgccttgcgcgcatcgagagcgtccagatccgattcaatgttgcacacgtgacttccgatcaaggagtagaaagtcccttcctcgaagatagccttttgcttggatcgcttctccaagatcgctaccgtatcttcgacgtcgcggtagaccatgtcgaggttgagcgccggtgtgcctcgcctcctgacactccgactcaagctcttgtcgagttgttcctcgagatccattccgtcgacgcgggaagcgccgagatgcatcccactgacgctcgcttcaaacgtccgccgtttcgcctctttgatctcgcgtcgcctccgtctcgttgaagccctgacgaaccagctcccaaacgtcccatgcaggcttgtcagacgccgtcgttcgtcgatgtacgcttccgccgcgatctgactacacacgccttggatgtattggtccaccacgttccgagtcaaggcctgggtgatcccatagactcgcttgttctccttgtcccgcaactcgacagcccggcgtttcttttcgtgtttgactgcctcggtgatgatggcctccttttgcccattgatgacctcgaataggagcctactagccaagtttctcgcaatggcgtccatctgctccgaggaaggaccgtcttgcttgggtctgacggcggcattgggcgcgcttgagctagatgacgaagcgacggcgttcgatggcagactattgacgacgggtcgagcaggaggaggcccaaccatgacaggggtcactggcctctgctcgactttgggttgcacgaaacgtacgaccggttcgaccttgggttccggtcgcacgatgggttgactcgaagagaatgacgtcgatgttggaagagggtttagaggtcgaccgaaagcgccttgcgtgccaaaggcagaggcaggccgttggggcggctgttccatgatcaacggttgtctgggtggggcagcaccgacaccgacgtgtgccatggacgctggattccgttccgcttgcgggatcttggcgccgagatcagactgcgtcgacggtgccgatggtggccggacctttccttgcggctggaacgccgctgacggagtaaaggcgggtgctgaaggtctaagcatactactcgaatcgctgggggcggtggatactttgccatcgatgacgtcctggaaggaggctctcgaacgtttcgcttcgatttctggccactgtgctgcagccggcgcgtcggcattatctataatcgtcaacccgctcatgtgatcagccgacgacgaaaaagagtatcgacagatccgtgactcaccgttataatccgctcctgcgctgatcaagaatcccataggcaagccatgaccctcgacgtttccatcgtcccagacgggcgtcacatcgagcgtgaccgccaacccgagagcttcttgatcgtccacgcaacccatcatgtccctaaacacctcgatcgtcatgaccttggtcttcatcccgggcgtcccgatattggccggctggaccctcgcatacgatctcatcaacgccctgacccctgcccttctgacctcgcctagcttgttgtgcgcgagacatgccacgagaaagggcacgtcgggccgtctgacgcgtttaaagtatcgggtaaagaaattgagactgatctcggcgttgctcttgctgccgaccttttgcgtgtcgaaattgcgttgagcgagcgcgcggaggtcgaatgcgatttggacgagcgggtggtggaagatgcgtgcgggtagggcgaggatggagcgtgcgacctcttgatcgtgcaagtgggataaaagctggtaagccctgaattcgggctcgttttgcgaatcgtggccgtccagccgttgatcctcgtacagctcgatgagcgagatgagtgctgtcaagagaggaaaacgcccgcaccacctcgtcatcagcttgccaccagacgagacgagatgcgtggacgttgacggattgccatcgatcgaaacccactcttgttcaactgctcagcctcttgtttcaagaaatgcctctcctccaacgtgcccagcatgtaaatactgaggatatgaaacctcgcgatcctctcgtgacattcaatgttctcggcgatcccccactgacgttggtaagtgaaatcctgcctgatacctcgggttcgatctcgcaggaaatggtgcgtgtgtttcagcgaggccagtgggggtgggaggaagggttgatccgggtcggaagagggaggagccggggtattgaggacgtgatgaaataggtgatccagagtgcgctatacagattgacgaacacggacacgaacacggtcagggtctagtccacccgatgtcttgccccgatgatggtcgctcgtcatgtaaacacataccttcaaggtctgcgggtcccgaacgtcggaaggcaagggctgatcgatcccggctgccgaacgatgatacatcgtgaccgctttcgccggatcgatcctacccggttgaccctctcgctattgacagcgtcggtgaaaatccaagatgcgtctattagcactgcatacacgaccacgattacctcccccgcgacgagagcgcgagcacagacagactcgcctgttccagcggatgaacgttcttcttgaactccctctcctgctgctcgaacaacggacacatgtccctacacgtcccgcggaattcgatagcgttctccaacgaggtaggtctgtcggggtccgagatgagtccggctttgatggcggatttacgctcttcgatgcgtttcgcttcgagctgtatgtgcgggtagaggttgggtcagcgggaaggaaccgagacggggtatgaagggaagacgaggatggtttcgaccggatgatgtggcccggagagacggtactcacttccctgaacctattaccctgcaaatccgtggcgaacctctgcgccctggttccatcctcatcgaccaagctgtggtcattatccgattcgacggcatccggggtcgtcggaccatcgtcccctagagctccggccatgcccagggcgttgagccgtttaggacccgtgtgggacctcttgaacggtttcatcgaagttgtgtgggggggggggtcgtcagggcatgtaggtatgggggtttgagtgtgtgtgttgtgagctacctatcgttctcattcaatatcgacccagtcagtctagtctagtctagtggtggtctcggacatgacctatgcagcctcgcgagattggtgaattagacggacatcaaggtgttttccgacttactggctgtatgctgtgtgtatctggtcgatgtccgttatttcaatgacatcatcaatcttgacagagacaccgggtcaactcacatcatatcatctcgttcaaacatctcacttgatcgtcaagtacaaacacatcatacacctcactcatagcataccacacacacaatcaactcgcacctcaatctcacacctcgcaatggaaaactttgtcaccgaagcgcgcaagttcatgtcctctgacgagggcaaggacatgatggacaatttcaaacaggtacgtcttgttcatcctcctcgtccacctcaccgcttgcatcccgctttatccgacgatcggctcatcctttgacgccttcgcatcccccggctcatccgttgatcagggcaatgacgacaacgccgctcccaaagagaccgactacactcctcaacaaggcggatccgggtccaactcgttcccctcggctgaagcgcagtacgggtccaacaccaagaccgataaccagtacaccacccagaacaccaacgacaacgacaacaaatacaaaaccgatgagcaggccgggcagggtcaagctcgtggtcctgctcagcccagcatggagggtgtgaacaagaacaagggcgctagcgattacgacgggtacgagcaaggcgattgtgagtcttcttcctccatcgtctctttggtcccggatggttcattctcaatacgttcgctaacgatgagaatgaacctgtcttctctcgatgtatagcctcggccactggtggatggggagccaacgcaggtggagattctttcgcccgagccgtaagcaattcccctcccacattacccctatccgcatctccgtctgcatctgcatctcggctccacctccatctgtaccgctcatatcgaatctgacccgcctatcctccgctcgatgccgatcacagaaccaactcggagccgagaccaagggaccctttgcctcggacccttcgaccaaccagaacggtctcgacgcgttcaagagcgggaccagtacgcccgcttatagggaggaagatggcaagtctcggttgaatttccctttcccattccccattcgcaattccgtccgattcgattcaagcggcaggaacaggctgagctgacttttcgatcgggattgacgttggatcgttttcagagatggattccggcaggagaaagactcaggggggcggcggttcgtccggactcgtgagtgtcactcctcacacacccctcctttttgtgcatgaacgggtttctatcagtgctgatcatcacccactaccatcccccgcttggctcggctttactttgcacagaacccgtacgggaacaacgaagaagacgtcccgaccaacgagaacaacccttaccatgaacagggtcgtcgcgtatgatcaaattgcgactggtatcatgatcgcgctcgcgatctactctcgaacggtcggccgtcgagtacgtgaacgtcagacgtagccagagtgaaagcatatccaagtgtatcattagcacatgtgggagtcaatgtcaaagagttccaacaagagcggcgacgactcgagcttgtcagcccataataacgagactcttcccgaacaggcgtcaagtcgacatcgagagagaactcgagtgaatgggtcgtccaagcaaaatcgattcggttccatgttcaatcggttcaaactaatcacctcgcagagcggtacgacacttgcctacagcttgctctgtctttgtttcctggccttttcggcttcttgcttgacgaaccgatcacgcacgtgtcgacgctgaatcttgccggtagccgtcctgcagaggcgagccgaatcaagcccatcggtagatcagtatactcccgtgacgagatggacaagcaaaataagtctcacttgggaatagccttggtaacgatgatacgctcaggaattttaaacttggcaatcttgccgttcagagccgccttgagctccttttcgatctgactgtcattctttccggcagcgtccttgatgatcaccgcggcccaaaccttttcgccgtatttctcatcggcgactccgaacgtgaccgcttcagagacgagcggcaaagctagaatggctgaatccagctcgatgggcgagatcttttcgcctccacggttgatgagctgggatcatatgctgtttagctccgatactctgtccaggcagacagccagcaaacttacctctttcagccttccggtgaggaccagatagccgtcctcggtcaagtatccctcgtcaccggtccggaaccagcgcttctctttgactccctgatcagccttttcctcggagtcccagtagccttccttgtttgccttgtcgttgttgacgtatccgagcataacattctttccccggatgcagacctcgcctcggccttgctctcccttgatcttgacttccttgccactgtcggcgttcctgatgctaagaccgacaccctgagggacaccgacgctaccaggatatcgtggaccattcttgggcagaggagacgcacacatctgatgggccgcttcagacatggcgtatgcctcgagcacaggagctttgaaagtgtcttccagcttgtggaagacagtaggagagagtgaagacgaacaggaccggatgaacctgatgttgggcaaagggttcggtagaggcgaagagagcaagatcgagtggatcgtcgggactatgcgatgctccaaataagttcgacaaccctcctcctttcgactcgtttgtactcaccggccgtgtaccaagtacatccctcggtcgtgtaatccttccaaaaggtaccagcactgaacttggtaggtatgacgacagaagaaccagacaacaagggcgcaagcagtcctgccaccagaccgtggactgtgaagctcaagccggatgagcgaaccgtcgtacgtttttggcgactacgagggagacttgccgtggaagagaggcataaccaagagacctcgatctttaggcgtaaactcgtacgtcttgacgatattggccatagtcgtcataatattgaggtgagtaagaggaacagctacgaaatggcaacgtttcagccggggctattcccgagcaatatgccttttttggctcacccttaggacgcccagtcgtaccactctgagataggtgacacagtatgatattgagcaaaacatgtatggatatcagcaaatccatctacggactcacggtgtgaagaaccaatgcgacatcctgctcttgaacaggtccgccttgcttctgatccgcgttggctatttcgacagactcgtctgccgactgttgcgatcatcattcagaccatttgaataagccgagtaaggatcatttaggcttaccttgccggctccaccagtggacgggtcgtagacggtcttcaaaccgactttaacatttccaccttggcccggtgacaacttgacgctgaccaccttgacaccacactttttggctgccttgagggtaggcttgtcatccgatgtctcgccttctttgactatcaagatgctcgacttggtatcggccaggtaaaactcaatctcgtcttgagaatacgccgggttgagaggagccgagaccgctcgcagccagccggtggccaagaacgctccgacaaactcgagcgagttgaccagggacaacgagacgacttgcccgccttgtactccagatccctcgaggacttctgcaaagttttcgacgtagtccttgagcttgttatagtctaggtgcatggctggtgtcgaacccgttgcgggaatggtgacggctgcagacccagtcttggccgagggcgacacatcggtcagcagagtctgaaaagtttgagcaggtgcaggcattatgactggcaatggagaaatgactatgataaggtggtcggtgtatgccagataatctggtaacttctgacccggtgtaacgtatctttatcattatcatcttggtgtagatttcggacaaggcgacaacccgactgcgatcaagctgtcgctgcgagagggccaagatgacgtaatctcatcgggcaaacccgaatcaaactggcgttggcaaggacttcaactacactctctacaaaccactactggtgccaatctgtgcacgacgtgcagggatcgtggcatgtgggtagatcataaatacagccgggaggctcagcaagtcctctacatggatgtcttgagacagcaacctcgttgaataacctttacgcgtgtcagtcccgccttcaacgcgacattgacggtcgccagaagcgcttgtcgttcgccattgatatagatcggcaggtcggcggtcgagaggtcatccatgtctccccgagcatcgggatctctttgttgccatctgatagtcgaagagccaatcactgtggtaccgccctcattcaacgagagacggccactctcgatcagtccaccctcgatttgcaagcctgtcaaggaccggatgtcagccgagctgtaaatccgagagtctaccgaaagccgctcacccgtcaccacataaccctttgcagcgtccccttggtcaagatccacatccatgcgaagagtctccagagaccatccattcctttgcgccgtcgactgtcgagtcgctgtaatgtacgcagacggctggaagagcaaaccgatgtcgacggattcgagcgaatcgtccaggaaggcttgcagctgtccaagtcgactggaaaagtcggacaaccattggacgagagtgatatctcggcggaccgtgaaccgcttccagttgctgggtatttcgcctatatacagcatacgaatgagtcgtgcacggttctaacaggccaggacgacgaacctcgacgcatcgcctggacagatcgggcgatatgattggtaggcttgatatcgcctacgagatacgaagccgtatcctgcagatcctctctaaccgccttgagcaatttctgaccttggttgagttctcgagcgaatgccaccgcaataggatcagaggcgacgtgtttcaactcggaaagtgactagtcacgcgatgtaggtttgcaggactgagcccatgcgcaacatactgcttcgcttctattaccactcacctttggaagggcccctaattgctgcgtacacctggtcgcaagctgatgcatccattctggccgtccgcccgattgcgacgaggacggattaaccgttgcgacgtcgacttcctcgggctctcgcaacgcgcgcagtctcctcatcacacgtcggcctaggcgtaaccgatgaacttcagcatgggttccggtgcaagcgagcagatccagcatacttacccttggcttccagcaataccttctcactttccgccggcagtcccaaccatgagtgaggattctcttcaggcaagctaagagcccattccctgaaaccggcaagcgtacgagcatctggcatcttcagagccaggcttggatctacgtcttcgactagctcaaagtcggattcgaaagctcctgcatggaacagcgagcgcgaaaagctgtcgaggatctgctgatcgaatgtggaatccacccgtccgccgtaaatgctgacgtttagcagagagcgtagagctatccacggaatcttctcgggatcgatattactgcgtccgcgagcgacactgctcagccatcgcttcaaggttccagcggcagcgtataggtcggcgtcgttaaagtcgtacgaggagctccagcctaacggattgtagcgagagcgttcttgaaccaccgcatggaaccacgccagaaggaaataaagcctgaccatctccgccggaccagattcgctgtcgaccacttcaaagccctgtagcgactccaacacgctggccctgactcccggggcgggttcattcatgatgatgcgcgattgaagcaggatactaaccgggatctttggactagtctccatcgtcaggaacagccggaagcgctggtctgcctggatagctcttagtcgtttgtcgagactggagagccattcgggagcgagatgcacatttttcaacaagacccagcttcctgttcgagtggcgtggctgatcgcttgatctgcaaggcgggtgccttctgaagatcccatggcgatggaagcacagtcacgcttctggctagctgcaagtgcgtcaacgcggaaactagcgtcgtagccaggcactgaacaaaggacgattggtgtcgagcaagcgttcgtggcggcgacgtaatccactaaggctttcgcgggatcgatcgcttgcagaggtgcagcgaaagcgatctttgtgagcgccgcggacgctgcgatgaacctgtccggacggaggcagcccatgattgtcgcaacaaacgccgcgtttgcgacagctggcgtgacagtgaaaagcgttaggccgatcatcacagtctggataaaatagcgaaaacttacgatttgcgcagataccagaaaccagtttcgaaaccgaagactccggttgaggatccgtcattacgttttcccaagcttctgtatcagaatacatcaactcgcacaatgttttcggctcgggaacaagagacaaaagctgttgttgttctaccgtctggagtaacagaggcataggctcggtgcgtgatccagtggcattggtcatcccttgaagaagctcctttgcttgtcgctggtcaggctgtaaaggcaacatctgggtcaaggcaaggcttaagaggacatggtcctcttgtagcaaagtcctcgcgacgcgctcgtaagagagggaaaagagatcctgcgtgatgattgttcggcgctccataagatccttgactccttgcagtcgagggtttctcagcaagacgtcatcaaacaagtcgaggaagaagtccagggagaagcgatagaagtggttcagctcgcctaatcgctcgagcaggaagtaaatcgcgcttgcagattgcgcaattggcctgtagtcttttgtgacttgttcgatttccgaggcaatcgattctgtctccagcatcttctgcgagatatctgcggcttcgcgtttcagaccctcgagcgtcgctatgagcttgtcgttctctagaatgcttccgctggactcgttgagcgcattgaggagcaacttctccaaatgtcttaggcgcaaccggaattcgccttgagccttgatgagggtgcttctgcggttctcggtgtctggccgttcagccttgaggatcttgtttaacgactggctttctagactaccacgcgtcatggtaaagttgacaactgtcactcggctgcttagatctgggggaatagcgatgagcgggtcgcgagtcgccaaaaagagcgtaaaggctggagataggtcgatgtcctggttcccaactcgaatcaagttccggcctccgctacgtctcacttcgcggttgagcacggagttcaacacagggtcaaggttctcgacatcgtgcacgagcaacggactcccgaaacgaagagcactctcgagattcttgacgaaggatgcgtcgatgaaactggttgacaacacctttttctcacgatagaggttcacgaggaacgtagaggcttgtccagtaggatcaatcagcagcgggtatcggttgaaccggtgcagcatcatggcattctccgttgctaggtcatccacgggcaatcctgccgaagtccaacttgcccggtcgtcagctgtagcgagatactccgacagcgccagatcatgttttgcggcgatgttcgatcccacaaggtgctcgatcatctcattccagagacttctgcggtgtcgttgatcgaagtacccgagatacgtcaggaacccggccgaaagcagagcatcccccacaagagtggtcatctcttgagcgaattcctcgctatctcggccccatcgattctcttcttgagacagactggccagtagtgtagaactgcgatcgactttttcctgcactctggccatctcgagcttgatagcctgtgtttcgctgatcagtgcagcatattcgtccttataccttgcgatactgccctcgagcttttctatagtctcctggacgacctttgcttgctctttggtcgtgttagcctcatgctcgagctcgtcgacttcttgcctaagaggttcgatccgatcgagaatagtcgcgtactggacttgagctatcacccagagtgccaaaggtcccatcgccttgttcgcgcggttgacgacctcgaacgtaaaatcttctcggctgagatagtctctctctagtcggcgacagagagcagcgtcgaccttcgccgtgtcaaagtgttggatgctgtaaacaaagtcatccctgcggactacagcagagatagcagtccagtctttaagattctgatgtcccagtaaagcgcaagtggcctcggcggccatgacgatcgctgctgggggaacacgaagcttttgcaactcggcaagttgttgcttcttgatgctaccgacagcgttggatgcttgggctaccaaaggctcgacagcagctaactcagcgttgacttcggcttgccgtttctttgtcaattcctcttgcgagctaagagcctgctgaatccgcagagaggcaatctttttagcctctgcttcctgctggtcttcaatcatctgcttcaatttcgcgttggcctcggcattcttctcattcaactccttttctttcaccgagagttcttgccgaagttcgccgacttgggtcacggtctcgcggagcttgtcaataccggtgttgatgtggcgttgctggtcttgtagatcgtcctgtttctcgccgacgattttgacgtattgagtaatgctgcaatctctgctcgtcaggaatgactcgaagagcacggtatggtcatggaaactcacaaatccaagaagtgtctcggcgtgatgcgagggacgctcctgccttgctctttgaggttgtgcatagccttctcggcctgtaaatgtatcgtgaccatggcattggcgacagcttcgcggtagctgggcgactttggcagctcagagtacgctggtacgatagtagcaggtacgtcgtattcagggttgtccaggtccagttctgccgtcatctccgttccgacttggaacaacgtgcgggttgaccagttgccaaaccagttcaagacacatcggttgaatagcgcaggcgaagtcgcggcgcggcccgccactccatctgacgggggattcatggtgaagaccacgtgaaggttttttgagatctgccgagtaaaccatctataaagttcgtccgtggaatcgagcatcaaaccgtcacgttgagatccctctcggcaagcattcatgagtgtcagaaactcgtccccttcaaagagtcctggaatctcggcgttggccaaaagagtgttcatacgctccaggaaagccgagtccagcgcattggattcgtccattatgaaacacatcctttctcccttgcaaccggcccgtctgagcacggtacgaagatcatcatcgaagtccgctgcggtataacgattggagacctggatctggaagatgctcaacccattcatccaagccacgaaccgggaaagagtcgtctgtcaaggttttgaattgtgagttaaaattcctcttcgtccgtcattgttgactgaccttgccgctcccgctcactccgataaggagtacatgaccttgaggctgacgaaagactcgatcgatccggaggacatgatcgaggatgtcgtcataaagcactaatggcacgtcgagctcttcttcatagaagatcctgagacgagctttcacgaagtctctaagcgcgtctcgttcaataggcaagtagtcctttgtcgtccaattagagtacagaatcggtctctgcagggcggcagcacggtcgacggttgggaagtgatgcagtgccacctcatcgatgagctcgtctgtccagaccttctcgtgctcgtgcacgagccggtcttgaaacaggcgaaggccctcatgcgcccataggcgtaccaggccatccaagtccagactttctaacggcttcaaagcttcgtatatacccctaacccaacgcgacaattcccgaggagaatagatgtagtgcgcctgctgatccgctgtgaagtgattctgagatacctgatagacctcgaccatggcttctgtcaacgcctcggcgaagcgcctcagtgtcggcacgaccttgagaagcgcgcgcgcgaaagtcccgtagatttgcttgagagcgatgcttccaggatagtcgaccattaggacaggtgcgtgtcgcaagaagcgcgagctaaggggtactcgtccaggatcagttggaggattgcatgcgccgacgaattgtatgcgctcgagcttgatccaagccagatcagtcgtgcgccagaacccgccgtgctcaatcatctgacgcatgtaggaaatcacacgttgtgttccgtaagtgtcctccgccggcagattgatctcgtcacagaatacgactagccatttcatcggggaagtcggggccaaaactgtgccactgttggtcttcttgtactcgcaatattgctcgaatgtcttcaagatcagctctggactggtggcactcgaaaaattcaacccggccatctccacttcgggcaattttcgtagagcgttcatgagggtcatcgtttttccggaaccaggagggccgcaaagtaccaagggctttcgctcggtgatccaagagtagagaacttcttcatggcgaaccgtgtcgatcgtcggaatcaccacatctgccgcggtgacggcgtgtgtgtcaatctcgatgatcggtacacgctcttgccaattgacccatttccctgtcactagatcgacgtcgtagtcgatgacggagacagactgattatcggtatccactggcagctgtaccccagtttcctcctgtaaaaaccgcgcgaatgtagaacgatctcttgccgttgcgtcgcccacgaaagcccagacgaggtcgagaagtaaacgattgcgcataaatagctcgatgcgttcgtccacaagcggaaagtcggcgtgattgtcattgtagagctgtacggagcgaatgcccttgttgatggcgtagaagagggtcgacaacgccctcgagaccgagaaatccatgatatgaggcagtgttcccgcaaaagataaagcctttgcgaccagtccgtccggcgagaaagacggcgccagagcttgaacaaccacctgttgagtccgaagatgggcagcggcagagtttgcctccggatttcgaccctgatcgtccgtgatcagtactgtcgtctgcagagttgccagggctttggcacaaagcatcgacgctgtaaccaggccctcactgaaccagatcatgccgcatctgctgacggtagctggagtggcatgtttcaaagagtcgacttcgaacatgatcctcacgttggcagggaggtacagtcgctctccgttaggcaacgttagaagtcgattgtcatccaggacactaggtagatcaaggcgagattaagtcatgttgcattgatgcaccggaccatttctacacaagaggacaacccacctattcaaattttcgacccactcgggatcaacgtcaccatcgaacacgatccagtgtcgtttgctgctctcgccccgagtatcatccgtgatacgacggaggatgctcgtaaatagtccatcggtccactctcgcgtggtgttgtcgaggactccgtacagatcatccttctgcatagctttagggtcaatcacgtaagatacgccctcgatcccgtccatctgtcctaacgcctcgagcagtactcgccaagcttcacttttgccgctggcagctggcccgacgagcatgactccgtgcgatatctgttgtacctggtacagctgaatcaccttctctatccaggactcatcttgctgcagttgcttcttgtcgcaagaggctccgatcgcttttcggagttcctcgagcggactctgacgtccggatatgttaggaaagacgtcggcgacaatgctgggaaggagcggtatgacgtttcagggcctatcactctcggtagatatgaccaatagagactcacctcttgatcaacgaaacgtctccccctagcagcttgggcaccagcgtttcctggagacttcgcaccatcaactcgagctcggtaccagacctttgagccggagtttccgcaacactggaagccgacatgcttccaagatggtctcggatcaggataccggcccgcaggagaacggctttaagggctcgaagcccaaagtcgtaatgggtctgggacgaaagctgctccctgcacatttcgaagaatggcacaatcttggttgctagtctctccgcgtcgcggaaaccttgcgagaacaacatgacttgcgcaatcagctcccggtcaggttgagacattgctacgctctgtgattcagtggtgaacgtattagcttatggacaggtatacccatcgacatcaacttgctcggaagagttctgggaaagtaacaaatcagatttagctagacagacagttggtcaaatggatgggtatactgactcttcaggttgtccggaagatttgatcggctatggtgtgatgcaatgactaagcattagcacacacgcttgtagaactccctggaaatatcaaatcacggacccagcatatccgggattcatggtaacaaatatacctatcagaagctatctcgttagaaccgctgtgggcgcgccttacagaagttttcgcacatacctgtctgagggtcaagctgaacctttttgccgatcagggatatctccgtcgcacttttgccgctcgtcgataccaaaccctgttgaatgacctgtatctgtgacgatactgccgaaagcatacgctcgtccaagcggttgaattcgtcaaaacagccccacgcgccaacctgacatacgcccgaaaagattcgacccattgcttgaaagtcgaaggcttcgtcgcagcagaaaacaagcacaaaacgtccgaggctgaccccgagtgccttgacagattccgttttgcctacgtgaaccggacggagaaggctccctcaattctcagcgagcaaaggtttctctttcaggcttacctgttcccgcgggcccaaatggcgatcctccgagtttggtatgcagagcttgggtcagtgtcaagaagcacttgtcggtgagaggtgtctgaaccaagcgatccggaatcccgaggtattcgaagccgtaatcgaataccgcatctgccatttcgacgcggatgcaggccaagcggtcctccactgaagcatcgaagtaaaatcgcatttgacgcagccattcgaagtcgttcactgatgtaacttggctattgatcaaggatctggtaacatctctctgatgaacgacttcggtgatcagatgttcacatttacgccgtgtcatcggatccaggtctccgataacggcatccgccagtgcctcgagaaccgcttgtacgaggttgagcacgttgtttagcgcctttcctcctgccaatcgatcatgcacaagctgagtccaagccgcttgtatcgcgagaacgaccagttgagctggatactgctctatccatgaaagtatggcagggctctcaaaggcactattggttgaataaagcgactgaagagctgtcatgacgggcaccagggtgtccgccagagtcgtcttcatttccttttccaatcgagccaaccagtcgttgacctttcggtgttccgctagaatgatcggcctagacagagccacgctttctccgtctcgcgacgtcattgccgtgatagtggactggtccacactagtctcaagcgacgccaatccagcaaacatctttttcaaatgctttgtcacccttagtgcatcgctactgttgccaatgatttccagaaggtcttcgtctccaagaaaataaaagcgaggaaacgtggatctttcgcgctcgaggtactctcccagtgccttttgaatcttgccgagggcgtctgcaaggcgttcgaaagtcttctgaatgccaggtatcgccaaaacgtccaggacgagcggagacttgtagactttccgcatagctgccaggaattctgaatcgatattaccgaatctagcactttcgacgggcaacagctgtttgatatcagcgttgttgttaaaaatgccctccaggtagacccattgacgttgcacatcgatccaaacgtcgaacagcgtttgtatcgcggtcaacttgttctcccaagatgccgcctcctcgtcaaagactcgatagtacggtgaagctttcatcgccgtcagcccgtttaagtgttcgctgcagacactgaacagatcgtcccaccccttgatcaagcgacacttgctctgatattggactagactgaggttgtaatcggtccagaaatctctcacagtccgcagatactcttccaggttgcgttcgcctcgggcttgctcgcagatggctttgatcgccttttcgttcgttttcaggtcaagatcgtagacattgcccaatgtgagcgtgttctcccgataagaatacgaaactcggagggcttggaagaggtgcctccaatgacgctcccgcatcgcatctcccttgagttccgtgactatcgtgttgtatttgagcagcatcttgagggattcgtgcacgtgttcgtaagctgcatactgcctcatacgagtgggtagttcacgcatatttgagatgatactgtcgagtgtctgccggatcttgcgcggttggactaagttccacaacgtgtcccgcacttcattgacctgagtggcgacgcccgagagcgccagccaaaccgctcgcaaatctttgatctcgtcgaggataggtcgcagtcgcttgtcctccgaaacggcgatgttgagggcatcttgggctttcctgagcatctcatggttgtcgttcagcttggaaattctcgtctcgaatgtttggatcgaattgatggctgcttccggcttgatacctccttgtataggtttgtgagcatcccagtctgcttgcgatgcagagatcttttccaatacgaccttgtgttccgccgcgactttcagacggagacccgccaattgctcctgtatcgtggcgtcctttcttttcaagatctcgtgaaaggcaccccactcgccagcgatacggtccgcatgaagccaatcgtccgggaaagcatatctttgcttctcgagagtacgctgcccttcttcaagagccgctacgtccggtgaccattgacctactttgcgtttgaggtcctgtacaaaggtaataaaagtcaccgcctgagcagtggacgagccgctgatggtctggcgctctagctcctgcctagccttcgacagatttacgttaatgtctcgcatgcgctcgccaagcttgctgccgtatcgattcaggatgtcccgctgccacgagtcgtacttggctgctaccttgccttgaacgtttgcataggcaataacacagagtccaaagtccttctgcgtctccgacgtatcgaatgtcgctcgggaatgcttgatctcagcaagaatcttcgaccattttgggagtgattcccccaaatgaccgtaaacaacatcctgttcgaggtcccagagtgcctgcatctggagccaccggtcgacgtatccccgaacgtggtttagcttttcttgaataaggcggaaaggacgttctaagaccggttcaggaaggctaggaagtagcgacgagcagtctcctcgctcgaggatcgtctccccattctgcaaggtcatttcgtaacgcgcgctcttaatccgagcctgtccacagacgacacccatcaaacgctgcagctgtttcagccaagccgcttgagccatttccaggggaggattcaagtagatgacctgattttttatgtggagttcgtgtgtcgttccagcgatggcttgcgcttgtccgacggaggtcggatcctttgagagtgcctcgatgtcctggcaccattcgtttatcttgttcgtaagccgtgttcgtaaaatggtcatcactttgttatcaagctcgttagtccagtcttccaaattcgtgtatccttcgagattcagacgatcagcctgaaagtaggcgagacgatcaggagacgtcaaatacgcaaaccaagaactctcgcttacgatctgctgcagagtgctcatgatctttgtcagtacgtcgttttcgtacggacaagatgccaagtcctgtagaaggctaccgatctgttcattgacctcgataatcacggtcgtcttctcctggagaattgcaatgacgctagcaaactccctgaagaacattatcgagccgtcttcgtccattcctttagcaccaggtgcgggtgtacggggtgtaccataggaataggcaacagtttcccagcgaatgccgaggcctgggataagtagcaatgctcagccggggtttttggtaagacctgacgagatcgagagacccaacttaccccgaacgataagttcttgtgccctcgtgcgatagtcggcgactagcatgcctaccgattcgttttcatcgatgatttcgaccatttggttgtacatcctgactgattccatcaaattgacggcatgggggtatatacgcttggcttccttggcgtaattgatgatggtatgaggaacgggaaagttcaaccagagcagattccgaacctccttgaagagcgtgatagtttgaggatcgaaattcacagcgagttccaaagcaggctggccgtttgcctgaagtggtgcgttgcgctgcctgatgatttcgagcaaacgtcctccaacccgctgttcacgccgcgtgacgtcttgcaaccacgcttcgaaaatcggcgtcgtgttgagctttttgcggaagaaatcgctctctgccttgagcctctctccttcggcatacatctcccagccctttccaaggacgtcttcgacacgcttcatgtcggctgagagctgcttttcgatctgcttggcccagatgatcgcgctcgccactggagggagatctctcagttgcgacatatgggacgcttcagaattgcgatagttgctggtgaatttcagatgtagtttcttgatgtcctccttaacagagtcgatcaagcgcgtttggtactcctgaatcgctccgcggatctaagaggatgattcgacatcgcgctcagccggattccgaatcgattctcgactggctactcgggcacataccttgggtcgcacgaaaagcgaattgaatttggaaaaaatcctgaacatctcgtgggcgttgcgtgctgtggcaaggcgacctctgaggcgagaaatgatctgattttcgactcgagcgacccgttcgttgtaggtactttcagcggtgatccagatctccgtgccctctgagttcaagccttttctttagcgtctcgaatgggaggctcggacggatcgcaacttaccgagcgaagtatcgagcacaggaacaggcttgagcccctcgtaggccgagcgcacttcttcttccatattgacgtcgagcatgttttcgctgcccaagcctttcagaccaccctgggtcccagtcatgacccttaactgttcgtgcgtgcgtcggaagtctcgtaggtaggcgaccctctcttgggtcttgacatgagcagagttgatcttgacgggaatgaacttttcgtttcgctttcgcatgactagagaaggacttggttcagcgatacactgtcagtaaaacgcaagatcgtgccaagtggactgaccctctcgggcgacgttggtaaactctttgatgttctcgtcccaagttgcgaaaacttccatcgccgccgtcattgtgttctcgaacgaggtataatccatgtacatcaaccgttgagcactcaataccttgacgcattgttcgttgaaatcgttcgaaatggcctcgacgaggggcaaagttcgtcgcaacgggtagggtctgtcacgagcgaactcacggtcagtcaatgggttgcctagacttaccgtccgaggcgatcgccgagctgactcacgagaccttgagcttcttgttgagatgaccgaacacgaggtagagcgattctctgatcttgtcgagttcggtcgcgctcaacaattcgttcaaggggaaatcccgcatcaacgcattatacttgacgaccgtgtccgtcgcctctttgagtcccgtgtccgagacgaaactcgtggtcgcgtggaatcgtttcgcgctcttcaacacgctcagcgtgagctggacttgttcccctgcgagttgcccttcgatgccttcgagcgctcgttccatggacaaccaaaagttgacctcttgggaagctgtacccgaggccacgtcccggttgagtttggtgaccgcctgaatctccttgatccagaggttgacgtcggattggagacggttcagaaaggcatcgtcggacaacaacgatgccggttgaatcgagtcgattgttagccggttgcctgaagcatgggcctgttcgacggcccgctgaacagccgggtggatgatcaagtgggtttccggaatctcgacattctgttgaaggtgaagcagggagagctcaagctcggcaaactttcgcttggccaccgggatacctgcaagtcacaacgtaggatcggtcagttccgtcaggtcaacacgctagcgtttatctgcactgactcacccatctgcgcctctcccgcctttttccctccggtgctatccatactgatcccgacctttttcgagctaacgtacgcgtcgaaccagggggtcacaccgaaatgcacaagactgtgcaaaccctcataaggcgtgccgatcgtcgtattctccatcccagcgtcatcccctgcaggatcatcgccgagcttatcgccggaagagacgaggctttgagtgttgttcgaagtggaaagcatgacaaagtggagttggtgtgccaagggggtcgaagggtccaggattggctttttcttgatcagagacagggtcgagatgagggaaggtgtgtgggagggaacgggagggaggtgcaaggtataggtgtaagagacatggtcttctaaggtgttcagaagatctaaaagtcagctaccaaacgaatgatggattgggaaccgaatgctcaccatcccgatcgtgctcctcgccatcatcctcttcagccctcaagtttctctccttggtaacatacgctaccatgtgagaaccgtccgtagcgaatctctcggccttgtcttcgaacgccagatctccgaacaaggaggactctagatccgtcctggttgccgccattactgtacgagcacgacatgtcagcttgcctcttctggaggacgagcatgatgaccctgacctacctggcgagagcagagaagtcaggtagctcctcaacgtgctgatatcaaaagacattcccggtccccgtctcaacatcatcgaagacacgtcgtccccacccgggacactgctgatcaaggcagccataggtagttttctctaatgttcgttatccgggtcgtaacagtcggtcgtcgaatccgagctcgattctcgattctatttcctctatttggtcatgtgtctttgaagggggacaagttcaggaagctcgctggtgactcgttgtggacgacgctgactcccaagtctgtcctggtctgcttgaagtgtgtgtagaccgatatgccggacctcaccaagaccttgacctggatattccccatcaatttcgtcgtgctttgatgtgcgtgctgcctgtcccgtccggctgaacgcgatgctcacactctcccatatgcgcgtcgccccaccagacatgacattcacaacaaacgcctctcgtaaccaaatcacctctccataaccaaatcgatcgtcgacttctgcctgagacagactttttcaatcaattcaatcaaaaaccaggtactagagaggtagtatccataccaaaccatactagagcgatcatctcgaaacatggaccaaatccccgccgaaatgatgttccaaggtatggccatgacccggtggctcagggtccgcaccgcgaatgtagctgtgctcgtcctccatagcgtgtattcatacagaatgacgcatagaaatggtagggagattacacaagacttgaccgcatctttacgaggttcgcgcccctgacctgtatgtaacttcatattggcgatgatcatggcgagctggaactcgacatgacatcgacctcgttgaaagccagtaggctggcctttacgagaaacgctcccgagattcgtcatttttcctcccgctcgctgccctcagctcgatcccccgatgcagcggtcgatctgcaaccagtcgggaacatacaacttgaacacctgaacacctgaacacctgaccagatatcaactggtgtcgaacacaccttcgtttggagacctcaaggatacggtcatcttgtcgccgaaacctctaaacgagaacccccggttgatgctcttcacctggtcttgtctggcacgacgacacactaccctcctccgacccttcagcatgccgcactctgcctcgaaatcttccgctgcgaccgggtcgaacccgatcaactctgcccggccgaccccgttctactgccatacgtgcggtcgacacacttcccactctgccaaacagacggacccgaacccttccccggagaacgccaagaaacactgttcacagcgctgcaagaacgaatcgagggcgtccagcgtgatcgggctcgtctggcgggaaatgctggacgagggccgggggagtgggaaagatgggagggtggtcctatgtgcggacgtccaggagagggtgtttgacgagtctacagggaggccgaggtcgaggtcgataccgctcgccaaggggttgcccgagttgagccccaagtcgatcgagggtgggagtgcagacgcgggatccggggaagcgacatcaccaacagtatcgacttcaacgtccccaccatccgcccaggcattagggatgctcaacgcttccaaccgcgaactcgtgcgccgttcagcccgtctgctcgtgcatttcggtttcccccacctggctgggaaaaagtcgagaatgttccccctggaatgggagaccgaggcgatcgaccgtttaaaggtcgagacgagggacgtcaagggggttggatgggatggcaaggtggtcgaggacgttacgcatcagaagggtgaatgggggttgaagtggaaggcggcggtgtagcatgtagcaaatggatcatctgcgaaactgatggacacgtcacgaagcagggcgattgtcttttgataagaaagctgggccaagtgaaaccgtctcgtcaattgttcaatgggtaccgtcgttgtcgccaagaccgatgccgaccttctggccgaggctttggcgcagggggaggagggtaatcgacccccgttgttcccaacttcattagcgtgtgtgcccggatgtattccttcacagaaaaaactctccttgctcccttggcttgctctgtgttgttttcttgttttgatccttgttgatgagatgatcgcgcgttcccctaacccctaaccccgtcagtaccatgactacatagagttggctgccggtattggggctactttcggccatcccgtaggccggccgaggtgactgccactcacctcttgttacatgtgattcgcgcctgattgactcgcccgtggctgttcttgaataggtggagtcggctggatcaggcgactcggatcccaccagatgccatcccgctcgatcgcgggcgaccaggtatctattggatccggcgttggatgccgttcgaattttcggaaagattgggtggctctcgcatggagtatggcagtctcgaggtgaatgagagaggacactcgacggtgacttggcagacggcgtgagctcgctcgcctttggtttctctccgctggtcgtgatccgctgacatcaaggacttgtgcgaagcgaatggcgagaggcaacgaatgcaagcttcatgtctgaaaacttgacgcctgaggaagccaagtattggaaagacaggcagaacatcattgacaatgtgtacgagatcctgtgcggggataaaactaggatggaatgggccgatcacgtcaatcttggcttatccaccaccatgagcatattgggtaagtacgatgccgtcggaaatcgagagcagtcggacgaagagatcccatcagtcggcgcgggtctctatgccgaaggaaatccatgttttgtcggtcgtcgaacaggtcaaagggaggtcagtggcgttacagcacccgacgaactccacgttttacgcaacatcggggtggccagtaagcaagggttctttcccgtgcgaggattggtactattgtgacccttcgacggcgaataccaactcttggtttgccgcgcacagcgatattgcaagatcacctccgatcctccattaccaaatgtggatcgtcctctctcgaacatgcatgtgtgacttgatggtttcatcgcgatatgcccaaccatgacaagccgttgagatttgtagaaaatcttgacgcgatcggggtccctagagattcacatggacgtgattgtcctggtgcgcatgtataatatgtaacatttgatatatccctctcctcgatacattccttccagccgctatccgtcttctatgcccatctcacagcatcacgagatgatgaggctcggtggcaaaccttgatcatatgacgtaggtgaccccgcaaggccgttgggaggtcgcccgtagcccttacacatataagcaggccggacggcagccagccagcaccgacgaaggacggcggaaggacccacccgattcaccacggatccgccagcggctcggtcgacatcttggacgctctcacgtctactcggcagtcttcgcaagccccccgcttggccttttccgactggctcgcagaccaaccggagggtctcaagtgggatgcgaaaacagaaaacatacccgttgatggtttcccgcatcccacaactggagctaggcatcgagtgtatcccttcggtatctttgaccctcagaccaagagggagaaggctagggtgagtctgatgtctctattttgcggtatccggtaccacggatcaaggggggacggcattcacgatcacgcattgccgatgtcatctattatcggcatacagatcatcggagccgtaatcgtggataccatgatcatcgaccaggcctttatccacaccgatcctcgaccattctttatggacgatgcactcaagtattattgggcgaaacatcgcaaggtgagtataagcttgcagaagtcatcctcatcgagttattgtccacggtctcggaaactgacgaagaacggtttgtcaattgtccctctcgtcccctctcgtatgatcaggacaatgacagttcacagccagcattgcctaaccgggtcttgctccgatgcgtctgcgatggagagtgggatccgacggtccgagccgactttagaagaggtgagcgtgtcacttcagacactgacttctttcccgaggcagtccaagtttgttcggtcaaactaaagtatttcctgttgttgccattgttgctatctcaacctaacgcaactgcagctcatgtcaactcttccatcaaagaactcgtctttcgagccgatcgcaccggtgaccctggacaccgcgctccgatattcgaagtcgtgcgaaggctatacggcggcgctccaggacatgatggggagctgggtgacatcatcaagacaaggggagcgatcgagtgcatcaagagggggtgccttcctatttattcccgttaagagggccagaacgtaccgatgtcttctcaggtcatgttgtctcgctctgatcctgcgcaaccttcctgtatactgtagtgtgctgccccgcccagttgctgaagaatccaaatctgtccgtcccgtctgcaggtgtggttcgagcatagcttcagccggagtcgatggctttgcggggccccctcgacctgcctctgtgcctccagataggcgcccggtcatgaccgaccctgacagtctgcgcagatccagttgccattccgcttagttgtcgactgacgtcatctacaacgattattcccttaaatcccgtacgatgacaggtcagctcttgaccattcgtctctgccagagatccctcctcccaacatcgtttatgtatgctgaagataggatcaggtagcacgaactggctgccacccctcaatatgtcaatgaagccgggacaattgattatccctccctctatcatttgtcgcattttgcttagcggacacaacaaatccttatacccaggaagtaatcgttgacagtgtttgtcgacactgtgcgcacggcatctcatcggaaccctacctgacggtttatgtacaaccctaacggaccaccttgtctacgcatgctattcccctggtcactgtgtgtagtcgccctcttttgcgattttttgcacaaggtctccgatgaacccggcgtcaagctacggatcgtgaacagatcagtcaggaggtagtcgaaatcagacacctatgccggatgcagtgacctaccctgatctcgccgccgtggaaacctggagattgaggggcaccccatccgtctgaagtcagccacctatggaacgattgaacggactttagtttcgcatgccatcttctcgactactccgccgaaaaccctctcacttgtctctcgtgaaaacggtatcgttgtgaatcgcatagtaattgtgaccgatgaggtcggctgggagcgcatagtccatagcgaatccaccgatatccatgacctgtcgcagcaacggatcggttagagacgtacgcgcactctacccttgaccgttggacttgcctcgatcacattcccgccgggcttcatccagagttggtgactgaggccatttccatgtacgcccaacatgatctagacacgggggtccagtcgagaatcagcctcaggtcttgaactttcaacccgatgtccccgctcacatcggtcttggcggcgagacaaaactgctcgcttttcgaaaggtcctccatgtacgcattgtacaactcgatgataccgtcggcgtcgagctgcatgagacgttccaagacccgctcggcgtcgtcgtcttgcagtgaccttcccgagttttgcctgttgatgtaggtaacgatgggtacccctcgatgttcccggtgcatggcgtatcctgccgcggttcccagacgaacgatgttgtcacgcaacggctggatccaatccttggtgacgccttcgagcttgatgagctcggccgacatcttgttccagaccgcgttcaatcctccaaaccgatgagccgcaaagcgctgtcaaaagggtcacggctgagtgagcccacagtgtcctcaatccgacccttgtcatactcgcaactcacgtcggtgatggtgattcgatcaaatacaaacgttgtctgcgattcggctcgatcctgccagaccatacgactctcaacgtgcgaatccggcatgatcgtgctgatgaaccaggacgtcaacttggcgtggtctcgctgcatgtagacgtcagcgcttgccctagtcgcgatccgtctctcgagccggctcacccagtcatccggcgcggtcctaaacatcaatcgctgcggcgtcttcatcccagccgtcgtccctcgaccttcagtaacggcatactggacggcgagtaacctccaagcacccaaaaaggtctcggcgactatgagaacggggttgatcagcttgtccgaaactcgaagccgtcgaatacgagccggggaagcatgcttaccgactatggtcaagatcaaggcaccccgtagccatcacaaacatcccgtcagcgtccgcaactcgtgacccgcaactctgccactacggcgacgtacaatgaaagtagtgacccatgaaagcgtacgacttgggatgcgtctgatcgtttagcaagacctagaacgttcgcacccgtcgtcagctgggtcccgccatgggattaccgccatactcgactcacgctgtttcctgccaacctgacggcgactgttcctagcaccgacctggcctcctcgattgacaggaactgaaagtcgaggtcccgaggcccatgtcgagacccgtcatcccgaggtggttccgacatgacaaactcgatagggggcggtcgcgaagaatgatcttccggctgatccgagacgaagaaaagcgtcccattcttgaaataaaggttgtcaaacaaggctacatccgtcgagctctattcagctgacatacgtttcgacccacaccactgtcgacgggactgctcacaataacctgggacgccttgcaggaactcggtctgcctgatagtcgaggccgtcggtcctagtctgacataacgatccggcgtgtctgtagacgtgctcttgaaagcgctctgcacgtatccccgtagtccgcccacttcggcattgccgctcgtgatacttccagttgacaatccgtgcagacagacgagtaggacgacgacagcggccaggaccgtcaacggtttgcgggcagtgccccgtgcgacggagaggacgtcagggatggacatgtcgatgagcgtttcccgagttgtcgaacgcaaagtagctcttgggcaagaagacgtgaccagatctacttcgtaggaacacaattacacgattcgccagactcgagctcggaagagcgatgaggatatttcgtagttcattattgtatagggactgtgcggggtttggcatgccaccctctcgccctctcggtccattgtgttgtgtctcatattcatatgtcgggtgactccccggaatcaaatttgagactttctttgacggatcgggacctggatcggcctcggttcggggatcggagggcttggcctcggttggttggccacaaagagaggcgtcgagaattgcatgattcacaagcgactaacagtgggtcaagggggcggggagtcatcgacctcgaatcaagccgaaacaagcacgttctgcacggaatatcttcagtccatcgctgtcattagggtccaaggatatggagctttacatggtgattatgaaggagggagagacccccgtggctgatcttacaacgtgacctacagaaatcggagactacttgcacatcatgaatcacctatacatgtcctggcaactcgctcacgatcctttcaatggcggtactcgacactttccgactccatgacgggtgctcccatacaccactcgtcctgagcatcggtctcgtcgcctgtagaccacgtttgcctatttcgacccgtgccagactgtcccagtccgtcgtcactagttccttgaccttttgagccgtatatgcctcggtcatgtcaggtggcacactggatgatgttcccccagcttgtcgttagcgggtgtaaacacggtgacgagtctatttgtcatgctactgactagctttcaatcggattttcgatcgcgctctgtatggcctcgaggagctcggtagtattgtccttccagtattggtagacgtacggcggcttcatctggagtaccgggccgtgttgcgagaacctggacacgtgggtcgggcagacaaaccgatgaggtctgatcgttcccacacggtcgcgacacctgctcaccctgtgtatatgtcccactgcgatttgaacggatccgggatgtaagtgggcatgactacgggcacgccttgacatctatagcgacgtgcagttcagcaaagcaagcccccacaggtagtctgcgccgcaacgtacagcgcgacgtaaggactgggagagatcgctggagacccaattccgatgagcacccggacgtgactcaggagcctcgcaaactcgacccgagggataatgcctagattgtcgataccggctggaatgaccttgccttcatcctcgacggcggtggcgtacaacttataccccagtttggtcaacgcttcgctcgcccaaaaggcactatcgacgtagcgatagaacacggctgtcgcggtgaataaataaagaatcgtcagaccgataaaagagatcgatgacctgcgaggcccaacctacaagtccatttggaatagatcaatgccgaatgttctcggtccgcatggggcacccaatcgatcgagtgacatatccgttcgatgccccatggcagatgagtatgaccagggtaggcaaacggtctgcgattcggagaatgggcctggcttagccacaaaacgacgacgttgtcccgccatctacttacgcccactgccaacgattaccgagaggattgtacggtacagcctccttgcctggaccttcatagtcatcggcctggaactgcgcctcgggcacgtttgcccactgcgtcgtagatgacccgaaccgcagtatcgcttcagccaaaactctacgttgatcattcttgggaatgacgaggacccacccaagtcgtcgttatcaacctgctcaacgggatcgtcccccgctcgtgtagaggaatatcttcgatcaatcccggttcgaccagtaccgcagtctcggtcagattgccgtcatcctgcagcttttcctggggatccgcaacgtatggcgtttggaaatcctgtatgcacctcgggtcggcgacgcaagaagtcacatcgaattgctcggcccagaccagatgactatcgccgaccgaatgagctcccatacatatcccaaggccaaggtgcgatactcacatcagatcgggcatcaatcggctcatgaggacgagcggttcatagtcatgaacgacaatgacctcgaatccagccttttcgacatctctgaggacgctgtcgagccagatgatttccccacccgggggattcccttcgagggtctgacgaaggtattggtagttgctcaagatgatgggccgagtcggacaagacacgtcgccatcgaggcatcgagctattcgtcggagcacgactttggtatgctgaccgtagaggcccctagccagacgtttctcgaatcaatacactgaccttctccaatgactccacctgagcttcgacccaacagtacttgactcactggtcccaaatctcgtgatgatgatagaccgacaacagttgctgcttttgtcttctccgtaggtccgtcgtccgccgtagaccgaaagaccagtcaaagtcacgatcgcccgtgctcgtaatgtcattgcctgtactgctcagtcttgcttgcccgatgagcaaatacagcagaaaacataagactagcgaggtgaggcccgcttgccacgaacgccggcttatttgtaacattgtaccggtttggcagggcaaatttaaaagtcgttctggctggcgagcgagaaatacatcatcattgagatcatcgacccattgctataccttgactagtttcgagaatggagacgattcctagccgagggtgatggccccagcccttttgccgcgatatgtcgttccccattctcaggtacgcagagggtggcattccggttgggagtcatctgtcgtgcagcggtagacatacatcgatcccgccacctcgttctcgccattcgcgcgcccgcgtgtctcagatgtctcggcgaccagacaaggtgaacatcgccggggctcgctcgatcggtctcaccacaatccgcaacgtcagtgagaaacgaacgtcgaacagcacctcatcatcaggccagaagatcaccgaggcagccacgctgacgaaatttcgtttgcgaacatgtggatcggatggcggccggatcaggctaggactttggaggtctcgcagcggtcgagctcccattgtcccatactcgagtgctgctcatcgatgcaatgtcacctgaccctgttctggcatggcctaggcttcctctattgggacacccttgtgagattccaccgaggtgcggtctggtgaaccgacgaaccgatgcatgcctcctaccagaacgaaggatgtagaaactttgctcggtggtgatcggtcgtgatcggacatatcggcgttgagccgcagccaacgatcgatgctggaatccatatggccatatgtcatctacggcgaccgtacgaccaggtagcgttacgacctataatagcaggtcattcaactcgttcggtcgataggcgaccctaccgtgagcctcgtggaccaaatctggcacccatcaaccccaggatgaaatcacttcggctcggcgtttgtgtcgattcctctacgcctggaaccccatcaacagcttgcacaaacgcgaacagtaatgcggactcgatcgatatcgtcgagaatcgccgcatcacagacaagtctgaggaagatgttgtcgaactggacaagcacgacgtgatcgatcaactctctgtcgtccctgccataaccccgggtgtagagtcgctaatcgaacctgtcaacgatgaggctcgttcaaaccgcgagctcgtcctacaagaccaggccatcagactgcccttatccagactcttgatgatctactttggaatcgggctcgcgctagttctcagtttcatggaccaaaccagtgtcagcacagcggcgccagtcattggaacggacatcgggggcagcgataggtgagccgaggtggagcgattaaaaaacatagcctctttgctcacctagactctgtagcatcacatgggtcggaacatcattcctggtggccaagtgagctcaagcacatttgcggtcggccaatcaaaagattcacaccaccctgcatatagctgcgctatgcatctcgtttacggacggctttcggatatcgtaagtacagccatcgattcggtccggtgccatcgcaaagccaatcctcaatccgtgccggcccttcagttcggtcgcaaagccatgttgcagctggctctgttattcctcggctttggcaaccttctatgcggttttgccaagacgcccattcagctgtacgtctttcgagccataagcgggttgggtggcggtggtatcaacggcatcgccatgacggtcgtgagtcgcgacctggtcattcaacttgcatatcactgacgacgtgcgccaggtatcggacattgtctctctcaaagaccgaggcaagtaccagggacttattagcgcagccaactcgctcgggtcatcgatcggaccgtttgctggaggtggcttggcgtcgatcggacagtggcgatgggtcttttggtgagaagatgcaggtaatgccgaggaattcggaacctgactaattgaaccccgacccccgaatcggctacaggatgacttgtccgctgtccgtcatcgtggccataagcacccatttcatcttgcctctcaaaccggtcgtcggcagcgtcaagtaagtcgcgaatcgtcttcttgcctggaaagtcatctcaattgcctcgatcgataggaccaagctgcggcagattgattatgttggcattgtcttgggtgctggagcgaccgtattgctcctggtcagtcgcgcgccgaagcagtattcttcatgagcttcgaaatgctgattccctccgccctctttcctccaggttcctatctcgggtggcggcagtgcgttcgcttggggcagttcgaccgtgatagctctgctggtcgtaggcgctgtcatgttggtcgcctttctctgctcacaatggaaattgagcagacttcctattcttcctcgtgaggcgaccggtgtcacaacaacatgcgctcctgctgacgtcgtggggttgcccagtacgcctcttcaaaacgccctccgtgtccatcttgttgatgcagagctttctgattggagcgatttactacggcaacatcttctacgtgccgatgtactttcaatacgttaaaggatactcggcgctcaaggccggtgccttggtcctcgcctacacccttccacaggccgtctacggggtcgtcgctggtcaaatcatctcgcgcacgaatcgatacaaggccgtcatcgtgtttggatcctgcatgtggaccttgtcgtctgggcttcagctactatgggaaaggacgacgccgctggcaaaggtcatcggaatactccaggtcaattcgcttggagtcggtttctgcatccaaacaagtcggtctcggtgggttgagtatgatcgcgacgggaatgtctgacaaggtcacgatctcatcgcagctctggtagccatgatggcagtgacaccggacaaggatcgggcggtagtcacggcgtctaggaactttttccgtacaatgggtggcgcattcggccttgctggtaagtcgttgaaggcttactcgctgcgcctgcgatcgtccatttacacattcgtgaaaagcctcgaacgcaatcttcaacaacgttctcaagtctcgtcttcccgccacgctctctcccgaggtccgagctaccgctctagttgcctcgctttccacgacaagcgatctaccagaagacctccgcatcgtcatcgtcgattgctatgcatcgtcgatacgaatgtgcttcgtatcattcacggcgattgctgggacatgctttgcgctgtccttcttcatcaaggtatgtctgcgagctggtacctaaaagtcataaaaactcatgaccaaagtcgccttggatccactcataggaagtcacgttccgaaaagacacagaggctttgcaacggcagaagaagcagggcgaactcgaccgcaagagcaagcaggaaggcgacatggaattggcaaacatcaaaagatagacagacaggcgttgaccgtgatcacatgtgtagcaaatacgagagcttgtaccagaaaatcgaaagtagattatagataccaggaatcattatagctactatatcgaaatcttgatctaattagttgatctgactaggggcaagtatcccatctacgacgtcctgccgtgggacctcgcgttactttgctgcctcgaaatgaagggcgagcttagctcgtcttggaccacgtatactgcttggcgacgatggtttctggacgtatttcctgcaagatggtgcttgatccggctgtccaagagcgaccatgttccctggacatccttgaacgaagcgtcccacaaatcggtggcagtgctgggcgtgctgcaacccgtagtggtcggactacctgtgagtccgggactgagaacaggaagacaaggctcgtcgaagagtaactttgcctcatccgcgcgcggtatttgcttgccgacccgttgaagtcctagttgagcggcaaactttttcagcgatgcgaaacgatcgaattgggcagcctcgaccgcaaggtctttgccgcgtttgatcttgctacgatcgatccgagagggttccgatcgaatcaccatcgaattggtttgttcaatcgcccggcctttggcgaggtattggcccgttatcgtatcgaccgtttccgccctgggctcgcaataagcttcgatgaaatcgtaagacgcctttcgacgacttgtctccttgaaggaaaacaggcgcttgaaactcttgttgttcgagtccacggcctttgatgtcgtactggtcccaatcgattccgtttgtccacggagcgagagtcggccggcttcgtgacgcaattgctcaacggtcgcgttggaatcacctcgagccgggactcgaacgaggggaaccacctctcccttcaagtgacagaagggttgaatgggcgttgcctccggtcgagcctgacgaccttgggcatgggtctcgacgacaaagtcctgcctggtcatcgagggcggtgattggatgtaccggtactgctctcgcggctcgatgtccttggtcatctcgtaaacttgaaagaggtaggcatcgagcgttttacgcttccacaactttgggacgtgattcgggtccggtttgctcctgaacacctttgccaagccagacgtctcagaaggcagtcgagtccaggccgaagtgttgccaagatcgcgcgactcggtagaccgcaacttgttgatgtcgaaagcggcctgagccagtaccttttcgagttggaccgggtcaatctggagggaaatgctggcatcagaaggattgagtatggtcgaagtgcttaacgagtcgacgagagcggacccgtttgacgtggtcaggaaaggggcggataggtctccaggctgggaacgaccgctttggaagtatgacgtgaccagatcgtattcacgagcggccttgaacgcgatacggacttcttcatccgaaggtctttgaggtcggacggggggacgagcagggagatgttgttgttccgaggtcgaggtggcagctgatcgcgtacgcgagtgatggatctcggctctctcaagatcaaagtcatcaatcggtcgagcaacgtgttcgatgatgttgacgtcgatagaaatggtctcggactcggtgcgcaaggtccgcagagctatgggagacacgagtctagcgagagattgaggttcacaggatggaattaacgattgagtgatggactccgagatgttgccgagattccagcaagatgagtcggtaatatctgtcaatcgttgttcgtactgggtgaagagcggagtcatggcgagtttccccatcaagctgatcgccgcggcttcgtgcgcgatgggttgacgtccggctcgagcgatatcagtgtcaacgttgacgtgttcactggtgctcaatcggcctgagagatactgcacagcaagctcctcctcttcgacctcatcgaatcgagccggttctggcttcagcaacttgcgcctcaaccaggcatgaccgcgttgctcaaagtcgacaagccactcttccgtgaaaaagcggggcggacccgtcgccggaaccgggtcgagggcagcgagctctccattgaacaggtcgagacattgttcgtgtttcgccttgaacagatcggcgagggaagcgttctgagcctgtcgcgtttcgagaggacagggcgatcgtgagctggttgcgcttgtgtggccaagtgacccgcactcacgtagcagaacagcccagacaggacgatgatgactacaggcagccagatcaaaccactcgcacgtaattccagatcaagtttgtcacagaccatcgagagtggctcaagggcgagcgcgataaacttttgtgcgacctcgtcgattcgggccgcggtgcagggtaggcaagacatggcgagttgatgtcttttcgcaagcggacgctcgtaattcttggtctgggtggtttgcgaaaggcagagcaagtcggacacggcggcaggcgattgatgtggttgacgatgaaagagtaataggtgaagagcgaggaagaggttgccctgcggcgagttcttatacgatttcccgccagtcaatcgagatgagctcatccaacgacttgccaaagtggtcccttgttatccgcctcgccgtcatcatagtttctcccctacgtagtccctccagcccgaatcgcaatccaggttcttgtacgaaagagccaacagcgctgcggaggtgtgcgaactagcatatcgattcgggcgagcgactctcagttacgaccgaggcttcgctagcctgggacctcgctcttacgtccggcttctagctcgagacgacgtaaggaggtttgtccgctcgacaggtcgacgagatgattggactctgggttcgcctatccgaatcgggcgaccgcaagtcatcaagggcttgtacccgcatttgcgtccatgttgagctttctgatcgcagcaagaggctaccaacttgatcgagctatccattgagaattatttgatgccatccctatgcatgatgacaagaacgggacgttgtcatcgacgattcgaggcggtgagtctacctcagatgaggtgaaaggtccgaccacgctttgaggtcctgcttcctcgtcgtccagtcttttttggaaccgtcattgaggacgtaataatttcggtccgtgaggcacgctcgggtaatcatatgtcacagatagggaggctttagtgtcgaatagaggtacattggttggtatcggcgagattgtatggtctcggtcggtcatcgtctcggttttcgtgaagtgggctggtctactcgagatcggatccgggtcggatctaagctaggcatatcgttatcactcgaaagacgaattgacgattgaccactctaacaattatgggacacaaagactgcatagttcgacacagtcggtattctggccagtgtatcctcgagctgtcatgtcgttgtcgtcacggacgcagcgacctcaaatgctcgatcgctaccgatcactcatcaacgacgacctacctcgagcagcgaaagccaagtctgatcgacaacccatttggccggtccacctgaaccattgcttcggtcggatcatcctggataacatctgcaaacagccgtggagacggatcatcccggctccggccatacgcaacatgtccccggatcagctcgagcaggccgtgacgttggccgaagacattttgagcggcaagacggacctcgccacgctgaaccgggagagcttgcgcatgagaggcgaaccctctcaatcgtcagcctcgggtctcattctgtccaaatcgaaagcaagaaagctggaccagatcctggataccgagcgagagaaaccgggtgaggacgatcgcaaacggtcacgcaccatcgatcactatttcaaggcagagaggaaagcttgaggtgctgctggggaaaaaagggtcggacgggatcatatttcgactacaagatttcgaccttacaacgacgtaattacacgaccggagcctcctatatgctcgcaactcggcccacaagcagcaacagcctccctctctgaattggagctgacctactggctgacttcccgttcggccctccattgcctgaaccgtccaacgtaaaagtagaggacagctcccagcaacagccaaccggcgaggacccccgtaaagatgaaactgagcagtcgtacttctccatgggaagccttgtctgcgaatccgctggcgacgccaaagctgacctggatcgacacaaaagttccgaactgttataggcaagttcgagctctgggtcatgacgtgcgacctggcacatacgaggttcttggctcctactaccatgaccaaggcagccccggcgttccgtggcaaaacttcgacgcaactgggagagaaagatatgagccgtggacatgagataccacggcgaccgatcgatccgactcactaagtggtggtcacgataaagaacgaaaccaaacaaccttgcaaagcgttaccggcgaaaacgatcgcgaaccagtgatatttctgcgggctgtgaccaaagacgccgtacatgatcagaaacacgataccgagtacgcccgggacgatcaacgagggcagctaccggacaatatcgtttagcgactccgtcctcagtctctttcgtagcgcgcccgaacttactcgatgttcgggtgtgtgcaaccctccgttcctcctggctagcaacatggagatcttgtcgccaccccagccggcgaccacaaaggcgaagactcccgccgggatcgctccgatcgcgttcaaaccgacgctcttttccgaccacccgtagcctcggacgaggatgtttccccacgtgagggatgtgtatatgatgatcgacagagcgatcgaaccaagaccgagcgcccatacgatggcagggttcgtcaagcacaagagcatctggtagtagaccttgggtaccgtcttccaatccttggccttgatgtcggtccggaacccaaacgcgatcgaatatttgcccacgggtcgttcgtcctcctgactgcccgccgccttggcttgctccttgagctcgttttcggtcatgggtaccacgttgccgaattcatcaacccgcacggcctcgccatcgatgagaaaggcgggtcgttcgaacttggtctcgggaacgagaaagatgaccatcaacatgccgagcgccgagagaatgagaaagatctgtcgggacgacatggtcagcgatagatctacaacggggacacgaggggacacgcgagacccacccaatagaaccactgccagctcaaaaggaccgcttcgtacgacgccgcaatggtcaacgccgcctggggaaaggcgacgagctgtatgtgcgccaatcgatagtgctgtcagcccactggtccagtcggggcacggcgatccggaagtagacgcggctcacgaaagagaacaacccaaacacggcagcccgctcgtgcacgaaggtatagtcggagagaatcagggggaggatggattcggtcgcccccgcagcgaatcccatcaagatacgagcgccgaggtgagattcgaacgatgtccccgacttggcagcccacacgcaaccggcgatcaggaggatggccgccaagatgaaactcggtcgtctgggaaggatcaaattgtcatggtcaggctagtcttgcggcacgcacaggagctacgactcaccgaccgaggacgaggcagagaggaagaaagaggaaattggcaacgcctgcatgtccagggtgatgtttcgggtcagtcgcccgtcgcgcgattctagcgagcaacttggcgacccaccagtaaacaacgacggccacgtaaagagccgtgagatttcgtccggggctaccccctctgtcatacgagatttccatgacggactcagccggacggaaacttatgcttcgatttgcaaggcactatcctatacgacactcacgtcgagcgtatattccgaaaaagataggggccagtgatgacgccgaggtcagcgaggtcaaagccatgcaagagaaccagatgcaagtcgctaggattccccatttgcgatactttgaaaagttcaaggggtcgcggggagagccgctaaggaatcgacgtcgagacgtgagttgcggtttgatcctccggctcatgtaacgcgtacctgggcactgggatgagacgtgtcttgccatcggcatcgagcaagtggacgttgccttcgatggcagtcttgaggggtagattcttgtctccgcccgtactctgttcgagatgttgaacggattcgacatatttgacatcatccaacttttcaatgtcggtcatggtgtattcggtggatgcgggacgagaacgcctgtttgatcttgaatgccgtgtggggagctagtgatggctagcgatatcgagaagtgaggtgattttggactgtagaacatttgtctagaaacatgactggggacgagatggttcgcctttataacgttctccctcgagcagtcgattcccaaccactttggacatccagaggatccgcggggacccagagtccgttgatcggatgcatcagtaattcgtcacacctctcgccctgtctcctgtgccaggccaattcggcggttgttaatgggtccgatcaccaggtgtttatgggatattgatgttgcgtagcggcctgggccaccgcacgagcttacgcctgggccgatacggaggtacggaccctcttcgcccgtcgatcgtccgtacgctccgttcgctcgcggccgctaacccgcatcggtcaagctttccagcgagatcgttgcgggtcccaacttatcgctccggtcacaggtcacatgactggggagccgtttacatgtgtgacttacagtagaacgatccgaggtacaattgatcagctatgtggacctgtggcaaatcgagggtcgtgaagggcgatcgacgtctgaagatatctgtctggagcaaggttgccgccgctttcgcgctcagcagccaatcgttctcgaccatagctctcttgacgatgtcggttacttgaccgagcgcagtgtcaactaagcggactagggcgcaccctgggcggcagagacaacgtagcgtgaccaagcgacaagccgggaagctggcctagggtagaggtgatgaataatgaatgatctgatcccgagacccgtcgttgtcatcaaaacacgtcgccgtcatcgctgtcgtcgccacttttctgtcggtgcccgcgcgaagggagaaactgttattccaccagggttggcatttaaaacgcgctcgcaaagtcgcaggatggccccttcgatggctgaaacgacgatcgttcattccctcgtccagttcaacaagaagccaagcctcatctctcactacccatcgaaatgtccccttctatcctcatcgtcggagctacgggaaacaccggtgtcggcgtcgtcgacaccatcatgcaactcgcgcccaagacgtcttttgcgaaccacgacatcatcgcgctcacccgggacaccaagggttcgtcggccaaggcgatggcggcgaagcataagtctctccgtctcatcgaaaaggattggaccatgatcgatgccgcttggctcaaggagtacgaggtcgagcgactcttcgtcgcgtctcacaacggcgtctcccactttaccgatgagtcgctgttcctcagtgcggctctccaagcccaggtcaagtatgtcgtgcgaatctcgactacgaacagcaacatcggtcccgacacccgcgtattttacgctcgaaaccattgggccgtcgagaccatgctcgagactcctcagttcgagtcgatgcactggtcttctcttcaacccaacggtttcatctcgctcgtcacgcctgcactcaccggttggctcgagacataccgcaagtcgggcaagaaagacacccttcgtctaatactggatggagaccacccgaacgccttggttgatcctcaggaaatcggagccgtggctgctcacctcctcgttgccgaggacactaccaagcacaacaaacaaaagtacatcctcgtcggaccgaccaacgtcagcggtaaagaggcggtcaaattgctggaaaagcacgccgggactgacgtacccgacgtcgtctaccgagacacctcctttgtagagtatctcaaatcgaccggaaccccggcaaacgttctggagtcgcttcgaatggcgcctagctctggatatgaagggagatgctccgtcgaagcatcgcccaccagccccgaggtgctcgaactctatcgactccatgtcggtgccctcgacacttttgaaaaggcactggccgctatctccgagtgatcgtccgaaagaaacaaactatatgttacacaatcccttagtgccgacgaatgatacgtccggggcggttcaaaggcgacacgggtaggttggcagaaacgtatggtggccggatgagaaatcgtatgcttctatatcatcgtaaattactagaccaagtcagaataggaatttgtggtacgccgaggaaaagattgtaccaagtcatgcaagggtcgttgaaagcttcatcacagaaagccactcgcatctgtagcaatcgcggaggcaatcgcggaggcggcatccgcttcggagttgttaggcggcgtaaggaggagcaatcttgggactcacggcgctcttttttccccctttggtataacaacctctttggtaggatcgcaggctaccgagggagcaccagaaggaatgaggttgggcattgatgagtccgaaaggttgttgggcgcggtcgtgttgatcacagaaacgtctcctgcccaggctttgactcgcgccttgagttcgttgtgacgacgcatctcttgccactcttcaaacatgagcacggcttgtttgctttcttctggaaacccttacaagagtgcctcgagccgagcggtttcgtcaatttcgcagtaggcatcgatttccgactcagtgtcgtcgagatcggcgtcgcgatcatgtgcggcatctgcagctcgatcgtttccttccagtttcggctgctgtctatcggtatggccttgcgcagcgttcaatctggatggtggctgcccgtcggtctgctcaatcgcctcctcgatcctgccgatgctgatgccgttgcttggaggaagtcgagatcctggcaaattagcccagacgcctgtgatctcgatgaatctagctccctcaagttcggcaggacgtccatcgatgagaatatcatcgatttcaccacgcttttgagtcgcgagtacgctttgcacctgacgctcgagatgggcaaagatgcggtacagattgcgtttggcgaaatttccatatggcttgacagccagcgagtcccactctggcttgctcgttgtcattcgatgaacggcctgcgcgaatgtgatgctgcctggaacttggggtgcatcgtctctgaccgccatgtagagtcgttgtcctagcttttcccagcaaaggaaacggtattccgattcagcaataacaaggcccataccacagccgtcagtcctgaacgccttcatcatgtagacgcaaacttgagccatcgcctagaaacaagacagctcggcacccgtcaggtggtcaatggtgatgacatgagtaggctagacataactgaccgttccccagtcatctggaggcttcgcttcgacgaccatggacaccctggaggattgtaatttcccgtcgatatgcgtcacgacccaatccggtttgttatgatcgacggcgatcaagccccctcccaatcctcttcgtttgggtccgtcagtgaaggcatcgtgaattgcaggattcgcggtgactttcttctgggcattgaggtcgatcgaggtgccgttgtatagcagacccatggtgaaaaagccggtgacaactttccacgaaacacggtcgcggtctcggtcaaaaacctgacgggatcgggtaaccagagcaggaaatggttcgtactccccgcgcccccgttcctcaatgggtaatcgggctcaggactgaaaagggtttctggggtcggtcgcgctacatatctggtcagtaagcggactgctgtggtttacaggcggtctcgaactcacgataagacattacttcagagtcgacggccgggacgagagtcggtaacgggagtgaatcgcctgtcgggcgatcgttggaaatgttcgtttgcaaagcggttgagggtggaaatgggtgcggaatttcggctgcagagttccgcccggcgaatgtaggcgagtcataactgaaaagttggtcgagatgaaggacgggccgctcgagactgatactgctgaaagacttcgagtgggcgagggaggaggagaaaggacggccgggagtttcgaatcgacaggattgtccacgcggagctggtctgaaagagcttacgatctggtaacattgggagtctctcctggttacgaacgcggagactggacattgtccccaagacgcatctgctgtcccgtcgtcgccgccgtgtctcgagaaccgactgcatcccccatttgcctgcggatcaaagcaggtgacgattctggcacctcttgaaatcgatcctcggtcgcattcgtcgttggcgtggcactatctttcgctttcatgatcttggatggagtgcgaaacaagtttccaacgggatttcgtctaggttttcgattcaccatatccaaaaatcgatcagtaaagcagctcaacggctccttctgcaaagtccagtgtggggctgacaacaaggctttgatgagtcctgaacctctctttgatctgaacgactggtcttggggtgtggaaggagttgtcaaggcgccggtggacacggtcgatcgatggggcgtttccaatgaagcgaggggcggaccgaccaaggcaggagcagctgctgggccagacgcgaggctttgagttcgagttgtgacgggcatctttgcaacgagttggctgggcgatgagtccagggtgttccggaggttcagttgtatgcgtgtgtctgaacgttagcggtgggatttgcttgcgatctcgcttgtcagctattcttcaggcagactacaagctggattgcggacgcgactcatcgcctcgtgtcaatttcaagataaccgagccgacatgaactcaaccgaatacatccatggagcactcgactgtaccactacccacggctcagtccaggcaaggcaaattacctagaaggtctcggccatgtgtcactccgttgtcgacgttctcgtcgtcgtcgtcgattcacaaggtggtctctcgaggtcgtcgatttgagaggtcaccatgaggctagcaggcagccgatcggcgatccgctatcagccaatacagcgtgacgatagcggttcggatgattggcaggcaagtcgcaaaaacgattcctattgcattggccgatcaaaacgattcctattgcaatggccgatatgatgatgatttcggatgatgagatctgggatctggggatctggggatctggggatctggaggaaatcacggacattcagcagtttcggctagaaatgaagatgacggacatcaagccaggtcgggaacgcggacatgcagcatgctatttatgatgtccgtgtctttctcttcttccttatctgctgccgccgccccttagtgctgctccttatcgatcgcgtgcgtgcctgggcgtatctcgggagattcgtttcgagatatcatcaacgtcgtcggcgacgaacgaccgaacgacgaccttgatttcttatcagtcgccagactcgacggaatactatgtggatctccacgggatatgcctgagccaatcccagctttgctaatagtcgagccgaatctcgctactgccaagccagacagccgcactctgatctatccgagcgtccagttgtttaataccagacatcatgacaggcaactcaggttgacagtcttgcattacttgtagtcaacttcgttcatcatcatcatcatcatcatcatcataccctcgattcatcacaccattactacacagctcaacccggaataaaacatctcgacttcaagtccttcactcggcgatacatcagacgccaccatgtcgaacgcggtaccagtaatgccttcctcatctgcctcgtcgtcttcctctgcgaccggttctcgatcccgccgccggacttcctccagctcgggaaccgcggcctctgctattccccgaatccgtatctttgtcgtcggtctcggtatggtcgggatcgcgttcatcgaaaagatcctcaacaacgataccgaggggaggtaccagatcgtgacgtgtggcgaggagaaacacctggcttacaaccgggtcgggttgaccgagtactttttgcaccggaacgtcagtgaactgtacctcaactcacccgagtggtacaaatcgcaagatccggcgaggttgtgagtctggagacggtacaggcttgttcgctctgatcaaatctgactttcctggccctgccccccgtgcgcgcatgcgctcgcagcgaattccatgtcggacaacaagtcacccatatcgacacggtcaacaaggtcgccaagaccgacgccggacacacgtacgagtatgacatttgcgtgatcgccaccggttccgatgccgggatgcctccgtactgtgacacggatcgggggaaacggaccaagggggtgtttgtctatcgaaacattggcaagtccgagcatgactcgtcacctaccgagcgcaagagttcagtagactaaccatctctattttcctccttgcgcctcgtagccgatttggaaaagatcatcacctacgctgaagaccccaagatcacccgtgcgaccgtggtcggaggaggtttgctcggtcttgaagccgccaaggccgtttacgaccttcccaccatcccagaagtcagcattatcaaccgtcagggctaccctctctctcgtcagctcgatcaagaggccgggacgatggtcctccgtcggatcgaagacatgggcgtcaaatgcctgaccaacgtcaacgtgtctagcatgctcaccgaaccatgccccgaggaccccgggatggatgttttcaaagggttcgagtttaccgatggggaatgtctcgaggctgatctcgtcatcatggccgtcgggatcaccccgcgtgacgatctcgcccgggcgagtgggatcaagtgtcacgctcggggagggatcgacgtcggggacgacctgatgactagcgccaaggatgtgtatgccatgggagagtgcgcgagttggaagggaaacacgtacgggctgatcggaccgggaggtcagttgtttgggcagaacttggtcgaccgataccgtgcactgactgtcgcatcgttcatcagtggaaatggccgacatcttggctttcaatctttgtcagacgcagacggctctcggatcattccgaccgagaaaaatgaacgcgcccgacctctcgaccaaactcaagctgatgggagtcgatgtagccagtttgtaagtgcatctcgtctctcgagtacgggcgagccatcgactcatcgattgttgtttgtcacgctagtggcgactttttcgctgacaagccatacggacgggaacagaaaccgctcgtggaaaagtttcccaaaaagacgagcatagaagacgcacccttggccgactcgcacgtcccgggagagcccgcgttccccggaacaaacacatgcgcccaacatcgcgcggtcgagcgcaaggtcaagatctacgagcctttacctgacgaacccatcaagtgtttgacctacaaggacccattctctgggacttacaaaaagttcatctacacggctgatggcaagtacctgctcgggggcatgatggtcggtgacgtatcagactttatcaagctggtatcgatcacaaaaaagaagaaacccctcgacgtcgcgccttcagagtttatcattgggaaaaaggcgggcggcgaggatgacggtgcggatctcgacgatgacgctcagatctgttcgtgtcacaacgtgacgaaaggtgcggttgccaaatgcgtcaaggacgggtgtgataccatcggtgacatcaagatcaagaccaaggctggtaccgggtgtggaggatgtatgccactagtgacgagtaggtctaacttgactggcagcacgatgctacaaggtatactctgctgactctaggtttcgccccgtgtagacatcttcaatgccgagatgaaaaaggctgggcgagcgatcagtaataacctttgccctcatttcgagctctcccgagcggatcttttcaacattgtcaaggtcaagaagctcaccacgttcaccgagatcatggaggctgcgggaaaagacaaggatagtctcggttgtgaggtgtgcaagcctacgatcggaaacttgatctcgtccactgccggaatcaacaagcacgttatggatccggtccatcacgccaatcaagatacaaacgatcgtttccttgccaatattcagcgagatggaacgttctcggtagtgcccaggatggcggccggagaggttaccgccgacggcttgatcgcggtcggacaggtcgcgaaaaagtacaacctctacaccaagatcaccggaggccaacgcgtggatctgtttggtgcgcaaaaacaagacctgccggatatttgggaagaactggtcgatgctggattcgaatcgggccatgcatacgggaaatcgctacgaaccgtcaagtcgtgtgtgggcaagtctggccgagttctcccgttatcgtgtctcaggattgtgctaatattgtatgatctcgcaggcagcagcttttgccgatacggtatcggcgactcggtcggtctggctgtccaattggaagaccgatacaagggaatccgatcgcctcacaagatcaaggggggtgtttccggatgcgtgcgagaatgtgccgaggcgcagagcaaagactttggtcttattgccactgacaaggggtggaatgtgagtcgatttgggagtcgcgcgatcaaggcagctcgtattgacctgcttgcgtcggtgcctactacagatctacgtcggaggcaatggtggcgccagcccacgacacgcccagctgttcgcgaccgacgtaccacccagtcaggtcgtccgaattctcgatcgttacctgatgttctacatcaagacggccgacaagctgatgcgtacggcacgatggatggagagctttgacggaggtatcgaaaagctgaaaaagatcatcatcgacgatgaactggggatctgtgacgacctggacaagtccatggacgcccttgtcggggtgagtctgggcgtcgagttgccaagagggtaccagcctaaccgaatgactctcgcttcagacgtacgaatgtgaatggactagagtggtcaaggagcctcatcgccgcaaacaattccgtcaattcgtcaacacgcccgagcgaactcggaacgtcgaacagatcaccgagcgtaaacaacctcgtcctgcggattggccgaaggacttccctaccgtacgcatgaacgagagtatgatcgaggccgagaaatccgaatggtcttggcaacaagtatgcaagatggacgatctgaacccgaccgagggtgcgacgacgtcgtgttcggtcaaaatcggggacagtcagatcgccatcttcaacgtgccgaaaaagggactctttgcgtcacaacagcagtgtccacataagcgcgcgatggtgctcgaccatggtatcattggagaggacaaggacaagaacccatacgtgtcgtgtcctttgcacaagcggaactttaacctgacctcgggcaattgcttgaacgatgcaggtgagttcgatcgtgacgtccgctacctgctctctcttgtccgggcgagctcattccaatcactcactgtatagacctgtcgatcgtcaccttccaagccaaagaacaggacggagacatttatttgtacttgccgcctggccaagcgctggacgcggccatcgggacgtcgaaatggatggtcaccaaggctaccgccgagctatacggacgaggggcagctacggcggttgcgctcaaggacaaggctttgcagttggtcgggccgaaggacagtatcgatccgaaccgtagtgcgctggctggggccgtgagcgcttgttcgaaaccagggttggactggtagaagaattgagtcgagttcacacggctgtcgaacgttgtacaaagacagacacacgatcgagcgtagcccgcgaacgtaccaaccaatgagctcgtctcgataatctagatctcatacattccgtgggaattacgactcgactccattccaaatgaattgatcgaccgcttatctctcttgaacggagctagtcgggagggtcgaggtcttatctgcttccgcctcgccccaaacccgttcggatgcaaaaatcgcgcaaaaatcccccgagccccttggccgagatgaaacgcctcagattccggttcctggcgccaagttctgttttcacttgttatctcgacctatctacagttcgcgacagatagaggtcagcttatctcgcggtgcaacacacgttcgctctttggtccaactcgcacaacttactggggtagaggttccccgcaacaaaccccctgtcaagctcagaacagaaccaagtccaacatactgaatttgaacaaacatcgaagtcgcaacaacaagcctagaccagtgtgcaagagtacctttcacgccatccaaacatccagttaccggagatatgagcacatcgacctcttccgaatcgtcttcgcccggaagcccggcggctctgcgagactcgttgctgcttacgacttcgtcctcgcgccaaacttcacctgccacttcggtccccagctctcccgagatcaaggccaaagatggtccttccacgctggaacaccctatttcaagcaattctgtcagcactggattgccctcgagcttcccaccggtgccgaaaagcacgacttatgagcagatggacgagaaggatgcaggtaccccggatgcctggctgaatcgggatcctcggctggtccgattgaccggaaaggtcagtccggttcatgaagtcttccttttgcgtatcgctcatatttttcaaactgtttcgcagcatccattgaactgtgaacccaagctcaacaccttgtttgaccaggtatgtgcgctcacaatcaggccggaggcatcaaaacctgatgcaatgtctcctcacagggcttcttgaccccttcggagcttttctatgtccggaaccacggggctgttcccaaagtcgacgagcaagtcgctcgagattggaagatccaagtcacagggtaagtgtctttcgttcacaattccgggtcgatcctcgttgacgaggaacgagtgtcgctctgcagtcaagttcgtaacccgatcgaattgtcattacaagatttgaaagacaagtttcaaaccgtgaccctacccgtgaccttggtttgcgcgggaagtaagtcgagtgatcgtgtttatcagacctatcatggcgatgacttacaagccccattaacagaccgcagaaaagagcaaaacgtcgttcgcaaaggtctaggattcaactggggagccgccggcgtctccactgccctctttaccggggtctacttggccgacatcctagctctcgtcaagcccattcctcatccagagacgggcgcgcgtccggctcacgtcgtattcgaaggtgcagataatctacctcagggtccttatgggacgagtcagttgctcagctgggccaagaacaaggagagggggatgttgatcgcctgggccatgaacggagagcctctttcaccgtgagcaacgtgcgacctaagcaaccttgaaccgaggctgacgacttgcgatacgtcacgtcgtatagcgatcacggtttccctattcgtctcgtctgcccaggtcaaatcggtggaaggtacgtgggatcgttggactaacaaggtcgactgcatctgctcaacgcaaccttcccgacgcttagaatggtcaaatggctcaccaagatcgaagtctctcatcaagaatctcaacactacctgcatgtgagccgatgcgagcaagttctgttcgattacggctgacgatgctgttcttgtttccactagttctgggataacaaagttctgccgacccaagtcatgccagaagaggctcgtgctgagaaaaagtggtatgtccaaagcccgacaatacctcggatcgaggtcgcatgctgatactaaaatcgggatgcaggtggtatgacccacgctacatcatcaacgagctcaacaccaactcggccatcgctcaaccggatcacgacgaggtcgttgacgtggagaaactgggtgaagattacactgtcaaaggatacgcatactctggaggcggtcgtcgagtgaacaggatcgaagtttccctagacgaaggaacgacgtggagtctagccgagatcttctagtatgtgtcggatgacgcggaattgattgttgatattattcatactaacactgggccacacagcccagaagacttgtaccgagccgtggcttaccaagacgagacttatggccacctcgacctgacggaccgagatacctgcttctgctggtgtttctggagcttcaagatgccctcttcgaatctcaaaacgacgcctgcgatcatggtgagagcgatggacgagggattgagtggacagccgcaagaaatgtgtgagtcgtgctgtcattcgtcagcgcttcgctcggctcacaaaaaggcgacgccgctcagactggaacgccacgtcaatgatgaacaattggtggttccgtgcggccgtgcatcaaatggacgacggtcgcagtgtgcggttcgagcatcccacattggctggagtgcacgccggcgggtggatggagcgcttgaaagacgagggccaggatattttgcgaccagtctttggcaagaaagccgatgtcgcggggccatccactatcaagcccgtggtcaagaaggaggtgtcgatggtgaaagagtcggtcaagcgcatcatcactgcagaagaactggcagcgcacagcgatcccgatcatccttggtttgtggttcgtggggaaggcaagtcgggtgctgcgctcgcgatgatgttatcgttcttgccaactgacgtccgtgacccgttccatagtatacgatggttcagggttcatgaaggatcatccaggcggcggagagtctatctctctcgtagcgggacaggacgctgtgagtattggttgggcgtcgttttggggacccgcgcttaaatatgaaggcaaacagacagaggactttatgtcaatccactcacctcaaggcagagcgatgctcgtggagtgagtctcggtaaatcccttcataccgcccacttgctgatccgactgcgcgcgcagctaccacatcggaacgctcgatgcacgaggcctcatcaacaaggtggctgaagcagagtcgaccgagattgaacccattttcctgaacaagaccaaatggaaaaaggctcctctcgtctctgtcgagacggtgtcgcacgactcgagagtctaccggtttgcgctgcaggatagcgaacagactctaggtttggtgagtttgttcccatcgtcgacgatgctccccgtagctgacgccctgtctcatgatggcgccgcgccacagcctaccggtcaacacgtatttgtgcgtctgcgacgcaaggctccccgttcttccggcacaggggatgaccgtgagagcgccgagttcgaggccactcgggtgctcgagggtgaaatggtacaacgggcatatacgccggtctcgtctgccaccgccaagggtcatatcgacctgctcatcaagctgtacctcgcaaacgagacttggcgggacggtggcaagatgacgaccgggttccacgaactcgaggttggcgacgagatcgagttcaagggacctttgggttgtttcacttacctcgagcgagggttgtgccgttggcgaggggtagaccgtcggatcaagacgtttgggatgatctgtgctgggtccgggatcacgccgattcttcaggtcgtgcgcgagattgtcgatggtgatgccaagtttgcgggggatgaattgcccaaggtctggtgtgtcgatagcaatcgcaaggaggaggatatacgtgagtttctcgtagccgtcgctagcatgcgaaacgggctcaccttgtttcgcgttcccatagtctgtcgacaagagttggacggtctggtacaacgttccggtggacgtttcaagctgcactacgcgctctctgcacctcccgaagactggccccagacttttacaaagggacggatgacggtggacactttacgacgacatttgccagctccatcggaagacgcgctcgtgatggtctgtgggcccgatggattgatcaacgagattgtcaaaccgggtctagcaagtcgattgggtgtatcggcgcgagaggaccgcaggctgacaatgtctttgcctcttgatatagactgcgatcgggtggaacatcgagactcagctggttatattctaaatgtatgctctgttgaagcaggttgtattcaaatgctactgtttgcatgaggcatccggcaggatacgggcctatccagctgtagtcatggtaacagacaattcgccgccctcgactggatcacgtcggtttgcgtatcaggtcgagtctcgacacggatgacattgatcgatcgataatggatacagtagatcgagaaaaggaaattataaaacgagacgtgtcttcccgtactgcacgtcatcgacccgacccgaaatcttcatcgcctgacctgtttgttaaagatgccctcctcgaccaacctcctctcgctatccggtctcaaccctgctccctcgcccatgcccaacctctgttcggtattgatgacgtgccgatgatctccattctcgtccctctcggttcgatcgcgaggtgcattacgtgccttttcgtcggcctcggcgtgtagtctcgaatgggcgtctccgcgtagtcttctgaacgtccgggcgccaaaggtggaagtaggtgagatccagtaagtgggataacgtcttcgacccaagttctgtcacggcacgtatcgaatgtcagcactcccccgagcctggaccgacttgccgactctggactcacgttccataacaaggcccaacccaactcgagacaggccgagaccaagacgatgtagatgtacctccaaccctgggtgatcgcgccctgttgggtggccgcgacgagagctgccgcacctcccggaggatgagtcgtccccgtgagctgcatggcgagcagtgccaagctcatgctcaacgccccgttgatccatccgaccgtgcccaactcgcctccgtccaaattctgtacgttgccgtaccttcctgacagtctgaacaatttggtcagaccgacggcgatgacgcagctgatggcgctacccccgatgatgctcctcggttgtgccaacgggctctcgaattgactgtacgccaataccgcccctgctccgaacgcggcgacgatgaggccgttccccggtgtatcggcaaacgcgcggatcatgacgatctcgatcaggaggataccgacaaaggacccgatggtgctccagaggtagttctcatacttgagcgggattttgttcaaccaggaaaaggggggtagggggaaaggttcaaagggtggtttctggcccggggtccggtagcctacgaaccggccgatgagggtggggaggtaatacctgatatcgtcgggtggaccatcgtgcttgttttcctgatccctggcgtcgtctgcgtccttgtcaccgccttgtcgaccgggttgagggtggcgagacttttcggtcatggccggagtcgtggtcgtgcttgtcgcggtcgtggtaggatccctggcggtggatgtcgatgatccggacaagctcgtacgtcgcggaggtgcgatcatggtggacgggaagactagcctagcaccgactcgctcaagctcttgttgttggtgttacgttggcaggttttccttgcctgatggtattggcatatggtcaatgtgtttttggtcaaatctatttcgagattgaacgacgtcagcgaatcgacagaggacagggtttcacgtgattgcggcgaaatgacgtgagcaagttgatatagacggtcaagcaatccgacaactaccattcacaggaacacacctgacacctgatgacagtcttcaattgactcgactacttgccggtcgtggactggtccaagttcacgtcgattgtcacgatcgagcggtcttagaaatcgcgaccttccatgtcctccatctcgatcatttctcatatgaatgtcgcacgtcgcgcgtaaaacgtggcaacgacgtcataatcatatcccgtttgagtgagtgaggtaccaccaccatgccgtttcactaccatcgccacagatttcaaggaccaagctgcgtacgcaaagatatatctgggtcatcagatttccttcttgtctcggaaagatgtggagggagacagtgataccgtggtcgacaagctgcgccccatatcgccgtagcacagaccgcgccaaattccgccccgttgacctgaaatactcgccacccaaagtcggagacgaaacgctttattgcttcgcactacgttccatccagtcgatcctgatcgactcggtaggttctgagatgtgtttttcccaaaccttactccggggctttgaagctcgtagcgaactcgcctcgagacgggccatgtgatgccgctctccggacccccaggtcgattcccgcctgcgcctcatccgcagacacttgctcgatagggatacagatatggaagacagacctcgagcggttgggcgcggaaagatatgctttgtccaatggcaatggaagtcggctcgagcctgggcgacctacggcctcgaatctatttctcccttccagcgctcgattccgagacgagcatcaagtcttcagaccgtgaccaatgatcccacctcggagaatcgatgcagatcggtcctaaaggatctcccacatcagttcgagatccaatccatccgccctcctctggtaggagccgaagaccgacgagaccattccgacagacgtcgtgggccgtggtggttttttacgtcttcgaaccgtgtattcttgccctccgtgtcgttctccttgcccgctaaatccggaccaagatctgaccgattcctacctccctgattatacagccgggagtaagtttcgatcgacgaacccgaaacaacctggacccgagtggtctgcgagcagagacctcgtcgcatggcaccttgatgaaacacgtctcgcgatcgaggctgacggcgcgtttgtcgaccaggatcatacgcatcgacctataatctgctcgatgggctttccttgactctcacacagtagtgcatgattctctacttaccttgttacgtgctatacgccagcgctgtgaagcacgagaaggtgaccaggtgtatgtctgaccatgacgtgtcacttccccttatcaaacaaatctcgccatcaaagatgacgaacccaaagtcaagtcgagcaagtcaaggatgatcatatgcttcatcatcccccgactatcaaagttctggtcgacttacagtcacaccctacttccagtccagttaacgatgcgactctacgccctcgtcccactattggccctcttgtctacggcgtccgcccacggttcacacggcgcacccgttctcaacgccgagggggtcgatgatcggaattacatgcaaaagcacgtgagtacgggttgtctagctggaagcacgggagggaagcctagtcgtcgtttggggttcacatgtcgaagggtggtcgagagctgaatcacactctcttcgtcgacgactcgtaggctcaagaggaacatcacttgaccgactttgacatcgagtcgttcttccagtgagcccgacctcgacttgcccccgactgaccttgcgctcaatgtccctacctacactcgcagcctgcacgaccttgaccgtgaccattatctctccgtccccgagatcgaagccatctacggcctgcatcaccctacccacctctcgagcacgggccacaccgccgcttcccccgccctcgaatccaaacgacagatcatcgtcgaaaaagtcctctcccggctcgatacggacaaggacggtcggatctcgatcgaagagtttgtcaagggtgggtgggaaggtttgcctagtttcgtcgggtggaaagggttgggtcatcattatgggagcgaggaggagtagtgagtcgggtggtgccgaaggaagggcgcgaggtcgctgatgtgcagggtcttgcttgcagcttcttgcatcatgaagaggtgagtttgggacgcgtttaggagcgtcggattcaggccgacgacgatactgagacgtgaggcggatcgatagctatatcacaacaccccggaaacgcagacggacgagagttatagtcacccggaaggtcagtctctgacgaagtcctggcctagattcccgagctgacctcagcactatccacgctgtctcgtctcgcccccactagacatcgagcactttgcccgcaagtccccgaactgcgtttgcgactggtgacacgcccactgacctttcacctcgcctgacgtcgacaccgacgacagaacacgaacacattgaagccgaggaagacgcccgtgaacgtgatttcgaaggtctccctaccgacgctccgctcactgccgatcgagtcgtcgtcgaccctctagactcgcacgcccatgggtcgcaggacgatcaagctcctggagctcaagacgccggggccgccgcggagggacaagccgtgcttcgtcgaccggccgggtcgaacgccgggaaaccggcgaggatcgaacggacccgaccttcgtctgaggatttgagcaggttggccaaggaggctagggagcaggggacgtggggggaaaaggatatgcatcgaccgaggaacgatcgggagaggatgcgcaagggtacaccttatagtcagtcggtcgaggtcgtctttggttgtcgcgagactgatcgcgttgcatttccccggtcgagtagaatacaagatgggccggaacaacgagttttgatcggggcgtcacactgtcacccgtgtatcacgtagcctcggaggaacgatcggtagaaaggatggttaccgcgactgtatatactataatacctcggaccatggtgatgtcgttattattcccgtctgcaagaatcaagccgtgtgagcgtcgtccttttgtcctttctatatcgaccattgcggggtcaatgaggtggcagccatcgattgtgaatggaatgggtacgtatgcgtgattgatttcgtgacaagagggtcaccagtaaactctttctcaagatggctgtttccggaacacaggagagtcatgcgccctgctcggagtcgatcgaatcccattgtctttacaaaaaatcacacgccgaaaaaccgtccaagtacaacaagctcgattacaccggcaacacctcgttcgcactgctttacgatcgggtccagaaattcctgatcagtccgtccgagggtggaccttgtctcgtatccctgttctgcgtctcgaccgccgttaccgatgcaggtcccgcggtcacaccctcgttcgtccccgtaccgagttgctcgccatccccggctacttcttggtcttggatctggatcgtcaatactccgaggacgaaatcgggcaggtcatccggttcatcattgtcatcgtcgttgtcgtgctgcccgtcccccgctcgactcgtcatagggtgcacgtccacatcctcgacatgatgtacggggaacgtcttgcccttggcgtcctcgatcgtcgtcggtccctgatctcggtcgcgttcgagctgttcgtcgagacctcgacctcggcgtcgacctcgatcgacttgctgcgtgcaaggtcgatcgggtgaggggaggaggatcaagactaccgtcgagatggtagatcccgattgtggttctagtgcgggttggtcggacacgggtgccgctgtttctgggatgatggtctttgagtggatgaatgccgacgtcggctgcgaggcaaaggcaaaaggcatggatccggagttgagcccaacctgggctccatcaaagaaagtagaacgacgactgaccttccacttgttaatgtcctctgggacggcttccggcgtcgtctcaccgatctcgatctcgctcatgacgggtctcttccccaacgcatccccctccttgtccgccgatcccaaccacccactctcaccaaaacgtcgggtcccccccctccgtcgccctcgcctttgctcgatggtcgttgacctttcaccggggacgaaagacgaagagcagcgagcaagtcgactatcactgggcaaagcagacataacagacagcttctcgattcgatcattcgcctgattgtgtactcgtaggagatgcctcgttcttgcttttcatcgttataataaatatagctcacaacccggacttgctcgcgccgtcacctcgacactgctcgtcagcagtagtctcgcaccagacgaagacgatcgccgccctgagttcacctcgctcacatacgagactgaacgcctcggaccggttccgtcaactgccctcgaggttcaccgcccatactttataatctcttccgctgagcatcgggcaccatcgagccgaacctgctttctttccgtacgacgtcctcatcgttcgctcaggtagcagcacatcacatcggtcattatcgatttggcgctctggacgagttccaactcgcgatcgatgcagtaccgaccggatcctctaggaggtagaggtcaaccggctccgctctcttcaactcaggatcgtcagcgtgatgccatggcctcgcattatggtggagcgatagtctcaaacgggccaggtcaaccgtacggtaccggtcccgtcaacggtcatacaggaggtcatccggcgacgtcgactgcaggtcctatggggatgatggccatggtacagcagtacctcgatcagcatggcgggaacgaacagaatggtggtcctgctcagcacggacggatggccgagcatgaagtgcctcagcaccaggcgtaccaacgacatccctctcaacctcatcgtcaaccgtccgagtctgctcatccgcaccacccgtacggtggtcaacatggctatccacctcccggcatgcctaattatcagagccaggctggaccttcggactatgctcgacaggaggtctatccatcacaccaggctcagcagcaccagcagcagcagcatcaagctccaccgagacaggctctccatcccgagtcggcaggccaagcaggccggcacccgggctataaaagcgccggttccatggggcctcatgaaacgaggtacaccgcgagtccgatgacgaacggtgcggccaggttcgacacgcctctgtccgaccagcatccctacccgcctgcgacaggagcttacccgcccggagcccgatcatcccatcctcccgcttaccctcctccttcacacgcctcgggacagcaattcgtgcatgctcaagagtcgtacggccgtcaagcatcgtccggtccgtatttcccccctcacatgcagaaccaacacgctcgacacacttctcagcctaccatctcgccgacctcgtcttcgtacaacaatcacaacaatgctcaatcttcatatccggtccccactcacacgctggatcattctcgcccgacctcgtcacacttgtcaaaccggtccatcgggatgagacaggaagccggatctcatcggggagacgcgagcctcacccactcggtaccccagtccatctcgccatcgcgtccaggtgcgatgggcggtaccagggaggcgatggatcagcacggtgattcgagtgcgcgaaagcgcaagatgggcgaggacagcacggaccgcgaggaatcgtccaagcttcaggatggcgagtccaaggacgtaaatggggtaccgacttttgtcgcatgcacaaagtggtgagtctcgtgcatgctccgacaccaggaaatcacacgaatcacgcgggaagctcatccatctctcccctcccctatagtcgatcgagaaagatcaagtgtgggggtcaacgacccgcttgcctatcttgcgtgaaaaaggggttggattgttgctacgacgccgtgatcaaacgccgcggacccgacaagaatcctggaggccgagtcaagaacagagacggcaaggatggcaaagactacaaaggccgcattcgacgggaaggcgaaagtcggagcggcgacgacactgggatgtattcgaacgacggtcgggagaataggttcgattcctccttgccgcccagcatggctggaggatccgttccacctgcctatctcccgcaatacgcgccgaaaccatatctcggtcacccggcagataataatgggcacggcatgatgggcgagttcaatgggatatcagacatgcaccagcaacagtcgatcaagatgccatggctcggggaaaaccaagcgcaggtgcatccgggtgcacccatgtaccatcctcatggtcaggcgggacttcatgttcaagggatagtcggggtgcaacctgatatgggtcatctctctcatcgtcagccgttaccggtggctgaacctccactcacatacgaagaagccaaacgcgtcctggaggtgggcaatcatcggtccgagaacggagggtccagcgctagatcggacgcctggacggtggcttcaccttcgggaggcagcaaaatgggtatgagggacctcgtctcgggttatcacgatattatgagtcaagctgaaatgattacccggtcgaggtgagttgtatgcaaggtgctatcgaaaagggctttatcattaggacgtgtcgttgacctttatgaacatgataccatcaacctttgaatgaccttgaagcgaaagtgaatcggtcggaaatggtaacggtgtcactcatctaggtggttacgagcacaagaagaacgcaacgcccaacatctggctggagcgcttgcctgacataacgtatgcgcgagatagcgactggatgtggatgaccagccttttcagcaataatcctgcagaagggtaagtagcgatgtcatccaagtacatgtcgaaggagaaagccgacgcccggtcttacctacatacaggttgcaagcgatccatcgcgaagtacgcgactttttcggtctcaactttagctggttctcctttttccacaaatctctctttctcgcccgacttcaccatcctgaagagcgtctacgcattcaaccctccttgatcctggccatgttttcggtgacgacgcttgccaagtctggtcgagaggcgccaggcggagagggccgcaagcgggcgttgatgtatgccgatgccgctcaatcgatgctgcagcagtcgatcatctcgcagagcatggatccgacaatggcacaggctgcactcatcttgacggcgttcgaagcttaccctcacacctaccacgcatctcaacgcttcgccaatgccttgcaaaaccttgataccatcatccaggccttccagctccttgccatggacgtcaacgatgagagggcttccatctttattcccaaccagattcccttgctggcaaacgactctgaagccgtcttgccggtgaggcctatcaaggcggataccagcccaacggactcgagctcgcaaggacaactgatgagtcgatgggctcctgaaccggcctggcccctagagtggagcgtcagtcagatccgtcaagacgagatgcgccgcatgtgttggatcgcttcgtccatggccgggcacctctgtcagttcagaaatatgacgggagatcaacagctcgacttgtacctgagcaaacctgaaaatgtgagccggcgtcatgctttcgtgactcggactgatcgcagagagctgagacggttgccaattgcaaaagtatgcgattttcttcaccgccgagatcttgctggtcgacaacgatccagagtccggcaaaagcactatttgggccttgttcaaccgggtcacgctcctctggcactatatcaaccgcgtcaagaggacaggaaacctcagccccgctggcaagctctccctcgctagcgaaatttggcgcgaggcggatcgcatagagaaagcaatgttctcggtcgagatggacggcggccgttcgatgaagtggcaggcgactgactggttgttgaacctgaggctgctggcgaccgacaactttaggatgttgccgcagatgttcggcggggacggcaagaagatgggcaaggaatatgccaagcgatggctggcaggtcaatcagccgtcgcccagatgctcatgtctcccggcggggtcgaagagaaccaggacgtggcgttcatcgagcctcgaagttatttcgtttggagtttgatgtcgcaagcgaatacgtaagtgcagccttgctaccatcaagcctgagaatctgtagctgaaagcttccttcggcagcgccatcgatctctatcgtcaagacccatctaccactgaagccctacatgttgctggtgaactgatgcgaagcatcgagagggtggccgaatcttggccaaccgagtgtgagtttacgtgtccacatcgaacgatgccgcgattgtcatcgactgactcgtaatcacttcgacacctcttgcagcactcacgatctacttgaacagattcaaggagaagtatgcccctgccgcgcaagacaggatcacgatattgtaacgattttgcacgttgccaagtgcgaccagaacgacacaaaccagcacgtcttggagatataattcagttgtagcatgagcacagcgacctgatgcattcacagattaagagacgccgatgccaatcttttgccgtactgcatgtgcacacccttgtaaacagctactaaccaagctccgaagttatcctcccccgtcacgttaacgccaggcacgaaccctgtcgcggcacgggtccatccaccgcgaccgaccgaagaggacgagaaactcaacagagcttgatatcgagttcgagatgatcaggtgtcgcaccgtgtacgagtgtacacacgacctcaataatataatcgggaaacgtcgacacaccaccgtatcatagagcaccaccttgttgcgagtctgatcgattattcccgaattcgactagatcaccccggccgagcccgcagacaagccttcgttgaacttctagggtcattcgcctgactctcaacgatcctttgaggccggtccacacggacccctcgcaagccatcatgcacaaagggcgaaactcggtcaacggaaaaggtttagacttcatggaggaggcatctccagacaggccaagccatgggcgtaatcggagttcgacagtaattatcgaagtgtgcatcggtcgttcatgtttgagctaactttatttggttcacgcctaggagacggctcgctcacaacgtgcgactttggagtcacagcctttgcaagtcggattcggctcggaggaggtcatgccacagacgggaggatacagcaatggatcgagctggtcgaatcgtgtaggacgaggagagactggcagatctggtcgatcagaatctccggacgaatacgctcaaaaaggtcgggttgatggcatgaggaacactggcccatacggtccggtacgagatggactcgagaagcccggtgaacaagatggtcttgaagatgctctcgttcgaatgaagaaaaaggcatacatacgcgacgcatcagtcaccggcctgtttgtgctgtcgtggtgagtattgcgtcttgcatgcctcgcaaagtgttggactttaacgctgcccatcgcattttgtaggtacatttttgcgaccatcctgtcgatctacaacaagtggatgttcacgccagcatactacaactttccctatcccttgttcgttaccatggtccaccaaatcgttcagtttggactggcatttgtgatccggcgcatatggccctcacttcgtccgaaagaacggccgaacagggctgattacacgtaagccgtcgtccatggtctgtctaaacgggattcaactactaatgacgtctacgattcttagtaccaaggtcatcccgacagcgatgacgaccgggcttgacattggactctcgaacttgagcttgaagactgtgaccttgacgctatacagtaagcgacaccgctcaaatatgaccaacatctggctcatgcctactgccactttgcagccatgtgcaaatcttcaactctcatcttcgtcttgatgtttgcattcctcttccgcctcgaggcctactctgtccgactcatcctcgtgatctcgtgcatctcggtcggagtctttctcatggtctttaacgccacgacggtgtcgatcccgggaatcatcatgatcttcacagcctcggctatggctggtctccgatgggcgttgactcagttggcgatgcacaagaaggaaatgggcatgactaatccgtttgcgaccatctactggctggctcccgtgatggcagtaacgctagctatagtcagcctcatcttcgaaggttggatcaaggtcttttcgggaccgtactttgaaggattcaaggcgattcagacgttggcgctcatcactctgcctggagcagtagcatttgccatggtagccagcgagtactagtgagtcatctgcttcgatccccgattatctagatacagatctgatgtctgtacggttctccagtatcatccagcgagccggaatcgtacccctctcaattgccggaatcttcaaggaggtttctaccatcgctctttcttcgtgggtatttggggatgaattgacgcggctgaacgaggtcggagtcgtcatcactgtatgcggtgagtgcgacccaaggccatatggaccgagatattggctgaaggatttaaccatgtacaggtattgcaacatactcttatcacaaataccacaaatcggtacacggagaggtcgattcgcacggatcttccgcgtctcagtctcgcgaaggtgacggatttgttcctctagttggcgccgaagacggcgctttgggcgatgcagatgagcgacgtcatcatcgggagaaccgcgagatgtatgtgctcggagacgaggatgatgatgaagacgaactggcacatgatggagcaggacgcgcttcgacttcaagcggtcgaagaaaggctaaagagagtgacgactttgacgaggcactcttgaggcggacacgatgatctcgaaccgggatctgtaacgaatagatgtgtgttctgtatgcaattccatgacattgtggcattgacgagctaaaccgatcgaggtggctgagatgggtcacgcaagcagttatatagccttgaaagtcattgtgcgttgaggcgcatcccgttactctaacgatgcgcatatcgttcaattcggaagaggaagaccaaagtaacgtcgggtccaacttattgcttcaatcggactatataccaagattatccctggtgccatgtcgactgccgtttaggtcttgccactatcggccatccgtttgcaatatgacatgccttcgtgacacgatcacgatctagatcccatcgtcaaacggcggaagtccccattgttccggcttgaaatcctccaaatgctcgtgaatcaccttggccccgtgcgtggcttccggatctagcgccagtagttcgacatcgggaacccaaacgacattcatcccggcgcggacccctgcttgagctccctagcgacgcacggtcgtcggtcagagggtgtacgtatgaagggagaaagataggactcacaaaaacggcgtcttcgaagacaaggcccttacttcgttcagccctttgaagatcattgacaggttcctcatcttcaccaacatcccgacctgaaccgctcgtcaacgatcagtgcttgcttgaaatcagtgaacgtcatcctcgtcccgacactgacctaattttttggctgcagccaagaacacctggtgagcacaagacgaatgagcgagccgcgattcgccgagcgttttcgttctgaactcacatcggggcaaggttttcctctgcctggctttacctctggggaatccgccgtgacgatcgcatctacggggaacaattcaaacaggtaaggcaggtgggtctgtctcgcgtagaaatatgatcaataggaggtcaaactctggatgaaacgttgaagcgctcaccgacttgttcaagaacgcttggtacccagacccggtagccagcgcgatcggtaccccatgcttgtgctatgagcgcgtaatcggagaatgatcagtcctcagggtagtcatcgccgctagtggtcgagtcgcatcctttgtcagtgacatcactcactaaatgctggaccagtcggacggctcctctcatcggggccacctctctaaacttttgcgggatcatcgtctctttccgtcggataaactcgtccacagagatcttatccaagagaccataagcccggagcacagtttctgaagatagcctcgcggctttcgggtgaagcaaccaggaaaaacgtatcgtccggtcagattggtggtcgtggtcgtcgacgagtgtgcatggaggggggcttacgagatcccattacttgcgccttgacatcccatcccaacgaacaaccgaattctcctaagatctcatctgtgttcgggtgagtatggcaaggtcgcgggtattgacagtatggtcgatataatagcgagatgatcgaatttgtgagaagcgttccgcgggctggactcgggcgcgagtccggagcttactggtcacctcggtgtagatccgctgagaagagcgtgtcagaggtgagatttcagctgtgatcgtacaaagatcctgactgtagcccggggagacaatgctcacctctgtatcgctgtcgatcggtcattgatcatggaattcggcccgggaagcgatcgacatcgaaatcagctttgtctcctcctcccctcatggctgaaattacgatggcccgcgaggaagggatattcttacactgtataccggaacatccagaaagatcaaccaagggccccatcgttcacagacacgctcgagagagctcactgagtagaccgtccatgtcgaacaaagcatattcgatcttggggaacgagctcgcttccgacgccgtatgggtgtagactgcggtcatgtttgctattccaggatgctgtgatctcgccgtattaccctgttgggcctgtccaatgtaagataaatgcggtagtagcctagtggctcgtatgtttgtacctgtcgtctcgcaactctagcaactctgaaagctggaatgacgattctctcgaagctggtggtgctcgactgatggactgatggcaacagcggggaggatggtcggcggatgcaagttatctcggtcttgtccttagcgcgcatctggggaataatcaatcagccggcagacggagggtctcggtgctccacctcagtctttcgctcgacggtgccatcacaagctgggtctttccatcgacctgaactggacctcgattcgttctgaagagtggatcttgccgaatcgaagtctcttcgctgtcttgcgaatcgaatcgggtaacagaccagacgatggtatataggtcggctgcgacatatgagtggccgcggcggagataatgaaaatatgacgcgacgacgacgagaaaaggggagcggcgatcacacaacagcttcggtctctgtgatgcgcgatacgtgatgtgacgtttgagctttcagggtgacaacgggggaaaggcccaagagaaggggcgatgagggaatcaaatcaaacgagatggaaaagatcagccccaattcgcgtgtacctaggatggcgatgggatgacagccgaggcacgtcgccgctcccaggtcagcgtaggtcgtggcctagagtgtctagggtcaggggatccaaactcgcacacaactttgcggcacatcactgtgcgggggcggtcaacctttggcaagacgccgcgaccgcatcgtttgcatcatgcgcatcgttcgcatccatcatcactcatgcctttatatcacacgtctgctccgttttgatgaaaatctggaattcgttgatcgaccatcagccatcagccgaactttatttgacgctcccgatctgacatatcacaccacaatcgcggcaggaccgcgatcgagcacaccccacgccctctttatatcgctttccgacctcgatatcaaacttctctgccaactcctggttcagcttgtcgagagagggctgcgtataatcagggctagacatcaacttttgctgatcgcgaccatccatccagccagccatccatcgggctcgaacgcgataagaccaggacgcgcttggcttggcattccattcaaaactcgctcgactttgttcacacccgcacactcgacgaccgacaccgcgatcctttcatccattgatcctcggtcagaaaccccccttcatccaaattcaacgtctcgacgaaggtcgttctcggtcatcgaatctggaacaaggaacctcgacggttctaccgaccccgactccttttcctcgcccttcctcttcccctcgtccgtctttttcaagcctccccgttcaagtgctttcctccaacctcgacaccgacctcttcaaactccccggactggaatatcgcatcgacactacctgtcatcgtatcgtggactctggacgattctccacattctctgcctattctcataacggttgccggacgacccgttactcgctatcacggaacacgtcaggatcaggatcaggtcgacacgcgaaccgcaacccaaacgaacagcaccagggtaccccgtccagaatccagacggcactaccggccagacgcgaaaagaaccctccgagcaatgtcttcctcatcctcgtcaacgcggaccatcctcgccttgttgctctgcctctcgctctcttcgtggacgatctacgtctcggcctcttcagcgtcctcgcagcacccccgacggtctcatcattcccgtgctgtcgccgccgccgccgttgtaggaggaggagcagtgtctaatgccgacatcgatgtcgatgacctcgcatctcgacggatcgctttgaagtacaacgaggcgcatcacgtcttcaagcgtgaacgcgggttggattggttgatcaaggagaagaacaagttggatcacaagtacggctcgcaggccgagcaattggatcgtcgggcggattcgcccgtaacgtgagtacgagctgtcagttctagagatcgttcttgtggatatcgacgctgatgggaaatgacgggttcgtgcgggtagtctggcaaaccaggatagggacgcttcgtactcggccgagatctcggtcggtactcccggacaatcgttcgacgtggctctggatacaggttctgccgatctggtgagtctcgtcggctcttgcctctgattgatgagacgacgctgatgatctcgatgtcgcaaccgcagtggcttttgagtacggaatgcacgatcggagcttgcgacggactggacaagttcaacccgacaacctcgtccacctacaagaacggaagcaccggcttctcgatcgcctacggttctggtaacgcacagggtcatctcggagcggacacggtcaccctcggcggcttcagcgtccagggtcagacgttcggcgtggtcaacaccatgtcggccggactagttgattcgcccttgtccggtctgatgggccttgggttccggtcgctcaccgtcacgggcacgacgccctggtgggtctcgctggccggatccagcgcgtggtcgcaaccgttgttcggtttctacatgaaacgttatcgcgacgtcgccaatgccgccgcgaccgagtcggagggtggcacgttgacgttgggatacgtggaccaggcgttgtacgagggggatatcacctacatctcggtcgacgcggataaacaacggtactggaacatccctatcggcggaatctcgatgcaaggcaagagcgtctcgctgtccggggtgcaagccgccatcgacacgggtaccaccctgattggtgggcccgaggcggacgttcaggccatctatgccaacatcccaggcagtcggaggatgaccggggtctactctggatactttgagtacccttgctcgaccgaagtcaccatgaccatgacctttgggtcgattgaagtcaccattcgagacaacgacttcaacattgggagctacgcggaagacgctagctattgcactggaggggtctttgttcagggactggccgcttcgtcccctgtgcagtggggtgagcctcgcttatgagcatcggatcgagactcgttcgctgactgtgcggtgcctcttgcagtcgttggagacaccatgctcaagaacgtttacagtgtcttccgcatgagtgagtcgacgtgttcttgaacactgcactagacaggggtcgaagctaacaattgcaccaaaataatagcccctgccgccgtcggattcgctcagctgcctggatcaggagccgtttcatcttcagcttcctcaacggcatcatcttcgcgcgcttcctccactgccgcttctgcctctagctcctctaccgcaactcaatctgccgcatcgacttcggttagcacggccatcgtcgtcgtaactgcgactgggagcgtcgacatgacgtcgagcggcgtattgcgatctaccctcttggcaggtggagccgaatcgaccgggttgggcgtcgcctcgggggagacaccgaccgggtccaacacggcgggttcttctcagccttccaacacgagcgcagcagcccctcgcttagccgcttccttgagcagcattctttgtgcaagcctattgatcacactctgcatgtcttgatcctctctggcaccgaccgagcacaacatctagcatagacgaccccgaacgaaacattcactttcacgctttatcacgaaaagcctacgacattctttttacgggcattccgtcgcgactttacatactataccaccttgtttccattatcattcttgtagtagatttccaggctgttgcccaaaggcacggaccattttctcatgaccatattatcgatatagattcgcgccgcattaggacgacacacaggcttgaacatggcacgatcactttttgataatgttcactcccttgcgaccgacataactcaatccgctccagattgtggtgccggcgacgacccatctgtggtaccatgcaagaaattcgtgaagatcagaagtaaattcacgcacacgccgcagttccgaaccactcactgcagcccttgcagagccaacgcaatgtccattgttaagagcggactgaccgtcgtcacggccatcaacaatagctgcaaggccgtgttgtacttgctgatctgagtcggtttgacctcggcactcgggataccaaagtcccagtatcgcgcaaaggtcttgggagggggaagcgagatgtagcggtagtagaatgccgatagggagagcaggacgtcacggccgatgatgatcacggccagggggactgaaaggtcgaggattatcagctaggttgctctgacatgatgcgcagcgcttttctcacctggcaggagacccttgtaggccagagtcactaccagcgtggtcatcaacgtcttgtctgctgcagggtccaggatggttccaaacaccgaacgcatattgaaccgtcgagcgatccagccatcgagctgcgtagataaattctcctcagagacgtctcaacgtgacctcattcgctagctttttgtactcacccaatcactgagaccgcatgcaatgagcaatcccgtagcataatcgaactgtcctttgacaacgtagtaaccgagtaccggacaagccagaatacgcatagtcgtcagagcattgggtatagtccatggagactctctcagctcgacctggttatcctcttgattgagtttcggctgtatacatggtcgcttcagctgaaacgttgcatgagcgagtcgtggtcttgcgacatacctcttgcgttggagtaggaggaagcggtgtcggggaagaggaatagaaccgggctgttcccagcaccgaatctctttttttggagtgcaggaattgatgtttggaatggcatgacggcaaagttccggcaggacaagctgccagaaagtcccttcgtggtcggaccgtagctaatgttgcaggatgatagaaccggctgcagtgggtagtccattgacgtaaggctgttgtccgcactggacgcagagcgtgacagttggcgaaaacattcatcttatctgcctggagaatagctcgctcttggcgtgaacagactcattcggggacaaggccgacctttgtatacgaggatgatcgccctttcagctatgacgacgacgactcaggtcaacaggatttgcttccgtgtctccttcccttcaacacatatcgatcgcaattcgggtcgtatcgtctttacatgaaagtacagcacggatctctatcttggtacattctacagaagatccttcatttgttcacttcatgtcgtatctttaggaaagcgagtccggccattctaccgagcgacctagaccaagacctcgctagctacggtggaatcaaatccagaatcgacggatcccgtgtccccactctcgctaccactaccgctagacacagacacttccttctgcgagataggaggaggcagccagcttcgtttgatgatcccgccggtaacggccagtcgcgtgtcgtgttcgagcagcaaatcgatctctcgggcgcactgtcgaccctcgttaatggcccagacgaccaaagactgtcctcgtcgggcatctccgcaagcccacacaccgtcgacgctagaggcgtaagactgtcgttgaaagcaagaacctggcaatgagaacacgctactaatcgacaggaaacaacatagacttacgccctcgggtgtctgaatgttagatctcgagtcagccttcagcttgagctgggacaataggttctggtctggcgaaacgaagccaagagcgagcaagaccagctgggccgggtaaaactatgtgaagacggtgcagcatataatgtgagtcacagtgagactgtaacaaaggcagccgtcaaggcacaccttctcggaaccatggatcttctccatcgaccattggccacctttctgagtccattcgaccttgacggtgttgacacctttgattttgccggtctcttcgtccttgacaaagtcggttgtcgagatacagtactctcttgggtcattgccccaatgagctacgacctcggcgtgaccgtaatcagtccgcttgatgcgagcgaatgtcggccatgggttgttcgcagcacgggtcacaggaggttcaggaagtagctcaaagttgacgatcgacttggcgccatgtcgcacggctgtacccaaacagtcatttcccgtgtcgccaccgccgatgacaatcacatcgagacctttggcatcgatatagcggctgctatcctgcagcgtgagatcatttttgacaagctcgctggtattcttggacaagaaatccatggcctggaagatcccttcgctttccctgccagggagtttcaagtcgcgtccaacagtagaaccgatagcaaggactacgccatcgttttcctccttaagctggttgatatcgatatcgacgccgacattcgcgttggtgacaaacgtgataccctcgtcgcgcagcatctggacgtgccgttcgacgtattctttctggagcttcatcgaggggatcccgtacatgagaaggcctccaatcgcatccctgatcaacacaagaaaatcgtgttggaaaaggaaaagcgaacgacaaggatgttaaaagctgaaggaagtcccgggcagaggtcgacttacgaccgctcatatactgtgacaagatgtcccgccttgttgagctgttcagcacacgagagaccggcaggtccggatccaatgacagcaatcttcttgcctgtcctttgtttgggcggttctggcttgacccagccttcttcgtaggcgcggtcaataattgcacattcgatactcttgatctcgacgggcgcgccattgataccagcaacgcatgcagattgacacggtgcaggacagacccttccggtagcccagctctaagagtgactcagggtgagctaccgtttgtggattacaggatacgtgatgacgcaccatattgttggtcgccttgaggcggagccaagcggaatgccagtcatcttggaaaacaagctcgttccaagaagggatcaggttggagatgggacatccggaattagactggcagaacggaaccccgcagtccatgcagcgggcggcttgcacctggagctcttgcggcttcagacggctggacacttccttccagtctttcgttctctttcgtgccggccggtatgcttctcccatccgcttgtacttcatgaaaccacgaactttgtcgagcttggctcctcgatcgactgcggcctgcgagtctgccatggcatcctctaaatcggcgatcgaaggttcgtgacgtctggggccgacgggttgttcgaccttcgagtggaaagagaccagttcgacagcatcctggcgggctttttcctccgcagcccgagcggcttccgctgcgagaacgcgcttgtagtcgagaggcatgacccggacaaagctactcagcatacggctaaagttcttcaggattctgtccgcaatttgcgatcccgtgaggtggaagtgctcttccaccagagatttcagaagcgcgatttcctggctgtctgtaacggtaccgagttcgaccatttcgcagtttaccttcgcgccaaattgatgcgccagatctagcacctgggggtccgtgaatcagtggcattccccgcgatgaccgttgaatatggctttgactcacataggcgatgcctccagacatcccagcagcgaagttgcggccggtaggcccgagcacgacaaggcgtcctccggtcatgtattcggcaccatgatccccggtaccctcgcagacagccttgaaacaggagtgatcgacatgagctcgccgcttggccaccgcaattggcttgttgctactatactgaccattgcgccgctgtttctgactgcaaaccgttcgcctgcgataccattgatgaaggcatacccagagctggctccatagagggcgcaatttccgatgatgacggcttcctcagctctgaacggagactcgtggggagggtagattatcagccttccacctgacagacctttaccgacctagatgattccgtcaaatccatcgtcattcgttaacgacgtgtattcaacgcgcgatatcgaaagacttacaccgtcattggcttcgccctccagttcaatcgtgacaccgggcgccaagaatgcacccaaagactggccagcggaccccttcatgttgatatgaatggtatcgcgtggtagacctgcctcgccatactttttcgagacacgatacgacagggtcgtaccaagcgatcggtcggtattggtgacgacgcagtcgatagagacagggatgcctgcttcgagggcgggttccgcttcgtcgatgaacttgttgtccagtcgctggtaaagcttgtgatcctgagcttgcatcctatgggtcgggccagagcgcatctcgaatgcaggcttgagcactgcagagagatcgaggtgtgcagtcttcggcgtccgcagagactcgttgatcttgagaaggtcacttcggccaaccgcttcatcgatcgagcggaatcctaatttagctaaaatctcacgcaactcgttggtgacatagtagaagaaattgacaacgtgctcaggttggccagcgaactgctcgcgcaggactttatcaaccgaagccacaccgactgggcacgttcccaggtgacactttcgcatcatgatgcacccaagagcgagaagcggggcggtagcgaagccgtattctagcgggcatgaagcagagatcagcttggcggtgctatgaatctaatgagcagccattcaccttcagctcccaagagacacgctatggcaacgtctcttcctgtaccatacgttccagaaccttatcagtgattttgctaggctcgcgccaagtttgggcgtgaactcacctgtgcgtaaatttccgtcggtctgaacagaaacaatgtcagcctctagggacgaaattacgcggaagtgttccggcctggccttacttgtatggtgacccgtccccgcagattgttcagaacaagagtctgatgcgcttcgactactcctagttcccaaggtagacctgcgtgcttgatgccagtccagcgtgatgcaccggtgccaccgtcgtgaccggcgaccaaaatatgctcggcctttgctttaaccacgccggatgctaccactccaacgccgacttcggagacaagtttgaccgagattcgccctcgaggattggcgcactttagatcataaatcagctgtgaaagatcttcaatactgtgcagccaggcccgcgattacattgaacatcagcttgtcagaatgtttcacgcgcgggacggcgagtgcctacctgtagatatcatgctgaggtgggggcgagatgagtccaacgccaggaagagcaccacggacacgagcaatcgaatgtgtgacttttgatcctgggatctctcccccttcgccgggtttggcacctttcatgcgggattcgaaataagaagaggcaacggtgaatacggtagcttacggtaagcggtacgctcctgataatgagcagataatgaagagtatgcaaacccaccttgcgccatcttgatttgtatctcgtctgcgtcagccaagtaattgcttgtgaccccaaatcgacctgaagcgacttgtttgattgcgctccgcctagaatccatgactggtttcaggtccatcgcgtgagaatatggttccggcggggcatcgtacccaggccctgggatcttcttggatctttcagagccttcgcctccttctcctgtgttcgacttgccacccaatctgttcatggcgacggcaagagagctgtgcgcttccatagtgatagatccgtaagacattgcacccgtcgcaaatcgtcgcacgatctcgttccagggctcgacttggtcgataggaatcggggtggctttctcgtatgcaaagtccaggagaccccttaatgtggtgcgcttcatctgttcggtcatgttgtgggaataggcatcataggcgttctgattcttctggcgtacggcgtcttgcaaattggcgattcccgtgggatcgtttatgtgaggttcgcctccatcacgccagtgatactcgccagtctctggcaaaccagccgctatcgccgtttgccgtcccgacggatagccgcgttgatgcatagcaaatgcgtccatggccagaatttcgaaagtcgctccttccactcgagaagcggttccaacgaagcactggttgataacttcgtgatggagacccaaagcttcaaagatctgcgcgcctttgtacgaagcgagagtcgagataccctgttttgacatgactttaagaatgccatggtctatggcggtacgatagttgtcaatgagcttgtcagcggtctgtccgtccttcgcgagaccttccctctccatcttgtggatggtctctagcatgaggtagggacaaacggcatcggcgccgtacccgatcaaacaacagagatgatggacttcgcgggctgcaccggattctaccatgagtgcgaccttggatcgtttcttctgcatgatcaaccagtgatggaccccgccgatcgcgagaatgtcgggcacgggcactcgctctggacccgtggctcggtccgaaagaatgatgattttgaaacccgcgtcgaccgcgttaagcccctcttggctgactcggttcaaagcgttacgcagtccaggaagaccttcccgcttgtcaaaggtgatatcgagggtaatcgaaggccactgagaattagccaccttgatgtgcgtgatcgcggtcatctcttcgatagtaagtacgggactaggcagcatcagccgatccatctgactgttgttgacctcgagcaaattcccctccggtccaacataggtaaccagcgacatgacaatggcttcccgaatggggtccataggaggattggtgacttgagcaaaaagctggcggaaatagtcgtaaaccatctgcggattggtcgatatacaagccagggcggtatcgttgcccatcgatccgagggcttccttgccgtcctttaccattggcagcatgagcagattgagctgctcgaaactgtacccgaatgctaaaaggcgaggatcgttggcgatttccgtctcgtctaggacgaccttgagcgagtgttgtcgagcgactttggccatgatctcgggaaggtgcagcagttgatcttcggcccaagcggcaaaggggtatttcttggcagttgccatcttcaactcgtcatcatcgacgatccttccctccttcgtgtcgacgagcagcatcttaccgggcttgagtcgcccctttaagatcacggtggccgggtcgagggttatgaccccgacctcggacgcgcagatcatgatatcttcgttggtgacaacgtatcgacaaggtcgaaggccgtttcgatccaagttggccccgcagtaccgcccatccgagaacgtgaaaagcgccgggccgtcccatggctcctgtaggcacgcagcccactggtagaatgcctttttttcgggcgacataagatcgttgttctgccatgcctcgggaatgagcaccatgacggcttccggcagggtcaagatgccattgacgacgagcagctcgagaacgttgtcgaatgccgccgaatcggatcctccttcctcgatgatgggatagagtttttcgagctcgttcccaaatttttccgacttgagagcaccttctcgcgctcgcatccagttcttgttcccgcggaccgtgttgatctccccattgtgagctacgagacgcttgggttgcgctcgggaccagctggggaacgtattggtagagaatcgcgaatggacgagggcaaagtgtgactcgaagagggcgtgattgagatcatgaaagtattcgtatacttgtacgggagagagctgtcctttatagacgatcgtcgtcgcgttgagggaacagatgtaaaacgactgagacaggcccctatcaatcccgtcaggcgtcagtgaatctctgctttccgcgctcatgatcgcggtcgcctcacattgccgtggtgcacatctttcgtaagacgaacagctgtctattgaaccgcatcgcatcaaatggcccctcctcgcaatgattaccggtcccgtaatgatccttgaggacgatgaacggttgcaagatcttgggttccctgctcttcgcgctgggccccaagatggacccgtccgtagggacttctctccagcccaagaccctcagtcctagcgtatcagcgatctcctctagcttcttggtctgttcgtcgcatagggtcttggagaagaatatgttccccgtagcataggtcccgttggaggggattcggggtaggaagcagtgaggtgtctcccggatgaacatcttgtgtgggatcccgtacatcccgccggcgccgtctccatccctcgagtccgcaccggctaaacgcgcagaaggggtatgatcagctaggatcgatgtgtccatgtgatgatgctcggtggtacttacttgcaccccggtgggtcatgttacataacaaacccctaccgtcgctcacgatcttgtgattcccctttcccttgatatgcacgacgaacccgaccccacatgcgtctttctcttcttcagggttgtacagcccctgcttggcggggaaagaaggatcgacaggatcgtgattctcgatgatggactctacaccgtgagagtactgtccatcggcaaaggggtcggcgtcggacgaatcggtgcaggtccaggtgtcttccagcatggtcgaggagtaggtgaccatggtggcccgctcgctgtccgtatctggtgtgccgtggacgagggtcagagggaaaagtaggtctgaggtagcgtcgtccagaagttttgcaatttaggctcaagtcgtcctgattcagtcacggttcaaaaggctcaaccgagcacgtttatgttctttggacaaaggcgttgtagcggaagataagactggcctcgtccaaaggcaattgacctgtcgactgaaggatgatgctagctttgtataaacctggatccagtccctgcgtatagagagataaagaggtcaccggtcacacgacctcgtgatgctcggatgatcgcttcgacgattgattcccctagaatcgcgagtcggacgtccgacaaggtcgacttcggtcggggaagacggggggacaaggtggatactcgcgattaaatcacgatgataaccgaagttgatctgaccagagctttgtcgatctatctcaagttttgcagtgaatatgcgagccttcgaatttacaagagccaagttgcagttgcaagttccaggccgggccacaacgagcgactatcaaggcgacttttgctatcctcttgcccgctatttcctttgacgcacggcggtttgatagcgagacaaatgtgaattgcacgcaaagacagaccggggacattgcccgaggcgcgtgtcgctcacccacccaccgataagggtccgcgtcagagaaaagggaggggcccaatcaggaagggccctttttgtaatggatcaacccgactcttgttcgtgccagggtatcggagtcagtgcatggcacgccgtactcccccgctcttcgcttgcctcgcagccgtggaagacagaaagggaaggaaaaagtcccagacgagccatctatcgagctatcgatacgccgcggccgttcatctcggcgatacttttccttccgcgtggctagtcacgaaactttatcgccacgcggtctaagcgatccttcttccccgttccttcccggcccccccacggctggacgcttttgccggccttcctttcaggtttcatcgtcctagcaacgattacacgcggggtctttgttctttctcatcgaaaggaaggattgggacctccctttgcgcatgacggacggatcaaaactccttccgaccggatggccggtcgctgcgagtgatcgcccaagattccagctggaacgggctgaaactagacatcatggccccgtttcatcttggtcgttatcgtccttacagcttgctgcatacagcgacgcggtttagcgtatcgcatgaaaggtatggccatcagtgtcggtctcatcgtcaacgtcctctacgacgcgggatttatgccaagccgacgacggatggcatttaggatgatgctgaatctccggaaaggaagccaatcaaaaacgatggcgagtaagctgcgaggcatgcgggacataaagggtaccgatatgatcccacccgaccgagtcaattgtcgtcatgacctctttcttgtcctcagacgcgtctcatctcactttcgtctgtcgtacagttagcactcgacgtgcacccctactctcttttgaacaaggtgcccccctcgaacgttttcctatatgccatctctcaagaacatcctcgccacgagtaccgcgctggtcgcactcctcccttttacttctgcccacagctgggtcaaatccgtcacagtcgccgggacacagtatcggggctgggatttcaattctgacccttactatcccgatgagatgaggcctgcttcctacaccaggaagaacgacggcaacggtccgtgcctcgagtgagcacccatcctctcgaaaagaaacgccctgttatggagagactgactcttgcgcgaccttttccagctggacgcagaaatgcatcatcgtcaacgaaggcgctaacgccgaaaagtttgaggcgactactcctacgcagacgatccctgccaagggcggtgattcggtcgttctggactggcaacaatggcctgattcacacataggtggtcaggccgtctacatggcggtgagtcgcgaccaggcctctatcgatggcaagcctttgatcaaggactactattcttggacaggactgcggcgctacttgtgaaggcgcggttgccgggtcgctttcctggttcaagattatcgaggaaaactatgacaccaccaccaacacctggcctctctctctattgaccgccaacccgttatacgagttcaaattgcccacagacctcccctcgggttcgtatatggtcaaacacgaactcttggctcccttcagtggacaacaattctaccccatggctttccaggtcgacctcgaatccacgggttcgaccgtccctgcacctactggcaagttcccggacatgcacgctagctttgagcccttgaaaacggacggacctagcttcaagtacccgggagtccccgtctaccagaacgggatcgtgtaagtaaagagccgctacggcgccgtaggtcggatgcgatgctcgactgaccgatcgcggcttgtattccatagcaagggggattcgggtggtgctgcgactgcaccagaggcccccgcttcctctgtcgccgctgaacctgcgattaccgaagaagcggcagtaccgaccaggatcgcacccacgaccaccgccgcggaacttcctatcccaacgaccgaagtcgctgaagtgccggctccctcggagctacccgtggaaagcgagcctattgcagagatcccttcggcaatttcattgatcgtcgaggcacctaccgtgtctgcagatactgcaacgtcgaccgatgccatggagcccgctcagcctgaagagactgcgcctgtggaggctatgcccagctttacgcaagacgtgcctgtcgaatcaattacggtatctaagacctcgtaggccggactgcatttgttcatcgaccgaggtcccgtcaatgctcatgaaccccttccatcttctattgaacagcccgtcctcgagcgtcccccctgtcgttctcccctcatacgtcgcgcccgcacccaccgagtccgagacgccagcgatcccagagacttccaaggtagctggtgataacctccagacgttcaccggatccattggagctcacatcgatcccgtgacccgtaagtctcaaccgccaactggatggatctgaaagtctattgctgatatgattcggcagagattggaagccaatactcttcgggcggaaggacctacaacttcctgtacgacgctctcgagggtagttgcaatgaccagagggtaggtgctggggtgctgggcgacgatggccagaagctcactatgccgccacgtttcagaacgcatactacaacgctgccaaccagttgcctaatgccgaagtcggcgcgttccagggccagtgcgagacccaggcgagtcgcgctccgggtcggtcgtttaaggtattttccactccaaagctgatccatgcgagatcctgtgacaggcctcggaatgctacgctgtcaaccgggcccaggcttccgtcgctcgaaggtggtccagccgggttctggcctggtaagggagatgtcataccggttcgattcgtccatagcaccctagggctgcgcctagtagtgacgtttacatatgtctgctttcatccatgtagtcgggcccacttctgagaggtggaaacttcagacgcaggctacatcaggcggagtatgatcattttgtctctatgcaaagccgatacatgccatctcaatcgtttgacagctagccattccgtcatcgtcgctaagcgatcaacttgttgaatttcaatacctcggtataccagttgcaggccaaaagtatgcgaacacgatgaactacgaccggcgactggttgaagacatattgaatattgactaatttatacattgcccagcgggccaccaccgttcaaaggcttatggcacatccctgtcttaggtagtcaaccttccgttctcgtaggaagactctcctcccttctttccagccgaatgggggtcggcaccctcggccgatccgaacccatggtccgaagacatcctcttgtcgtccttgccgtctttcgtctttccatcgtgctcagaaggcctacagacagacagagaagatgtaaccgaaacgcttagtcggctgcacggacgaaaaggatgaggggtcagcgaaagggtagactgacttgtactgatcggtgctcgattgacctttctcggtgaccagacgcgaggtaccgtctccctcctcaatgtacccgtcggcgtggttggatccgccgttctccttgaatcggtggtcgggcttgccgtccttggtgaggtgggtctcggggttagactaaagacagaagacgtggtgaaaaaggtcatgagccgagcgtccgagagaagactcggctacacgagaaggcatgcttacagctccctgttgaggtcctcgggcagaatcgtcagacatgttgataaagtgtttgtgttgtaaagtgtatttgaggtgagagaagtggtttgtgttagaagagttcaagagcggttggtgggattgagtcagttgttcctaaatcgtccaggttatatactcgtcctgggtcgagctcgcgattatggagatggcaggtgacatgccgcatccgatgagatcgatcatcatcatcatcatcgacgtgatcatgacatcatttgtttctctactcagcgatcaccgatctgggggttggttactttgaaagctagacagacgatccaccccaggtgtgaagccccacgagccacgagctagagtcccacgtcatcgccgtcatggggggtgggtaggggcaagtggagccgtcggtgatggtggcaaggaaatcatcacaacaaagatgcacctaacatcccccccatcccattccccagatgatccaacgaccgaggaacaatcgccgggggggggcgtttgctgagctggaatcgtccatcaacccggggcggagcatcgggagacgattgtttgtcaaagtcgcgatcgatcgagtcgcgcgcgactttctcgcgtttaatgacgcgtcggggtcgatacgtcagcctcttgctcatttgccaaatcaggatcgattccggatcatggaaatgcattagggtagctacagtcagtcacgacccggcagtacatgctgcatgtggcgcaaggggtgtgagatggtgtttacaatctaggagacgcgtcatactggctagcttcaaaacgtccgtcgagggtgagtccattcgagcagatctttcccgacgaccgtgtcgtcttctagaccttttcccgtgacgaccggttcctcctttcgatgtccatcaaacacgtcctctggcacggcccaagtacccctcgtcagcaaactcctaatcgcttgcttatcgtcgccatcttcttcgaccgcggatttaccggtcccatcgagctcgaccgacttgacctggtccatcaaaccgacgaggtgagagagcccttccaagagttccgtttcctcggtcgaacctcgttctggtggggcgatcgcggcgagtttgtgcagcctagcgagcgtctcccccgacaggtccgctcgaggaggagagaggatgtcggatgataaagccgagggttcaagggggatgccttctgccgatacctcgacgccaggatttagagggtcaaagcgaggttccgacgaggcatcttcctccaggctggatcgagtctttgtcagatccgccttgacatcgtcggctggatcgtcatacaactcttctgcttccctcgcctcggtcacgtatctccctaaccgttgtaccacctttttcaacccgagattgtatttgccactgacggtgacgagatccaacgattcctccccgtctttcaatcggttcagaacgctctccaccgcggcccttttctccttgcctacgtctttgtcgacctcgtccgccttgttgaggatgaccaaccgacccttgcccgacaagcccgatttgtaagcctcgagctcgtgtcggagcgccaacaggtcttgctccgggttcggcctcgtcaggtccaacacgtagacgagcgccaacgaccgttcgatcgagcgcaagaacgagtgccctaggccgtaattctcggaagcctggggcaagagacccggattgtccgacatggtaaacctcacgacctcgacgcccctgtcgatccgtgacgctcggggttgagcggattccatcccctcggcttcgctctccctttccttccaggtctcttcgacgacctcgccctcggccatacctcccttccacgtcccgtcgtccatgacgcggacgaccccgacctgcgggttcaacgtggtgaactggtacccggccacttccgcccgtctccccgtcagtgcacgcaagatggtactcttgcccgcgttggggaacccgacgagaccgacgtcggccagcagtttgagctcgagtgcgagggtgatgatcggaggtgccagaccacgggaagccaacctcggtgcgcgatgcgggctggccgagttgaaaaagtgagggttgcccagtccgcccaacccaccggcagagatcagcacgggtttctctagcggcttgtccacgtccagctcgagtggggtgtacgtctccggtcgacgcctcggcaagatcccttccctcgtaggcatggcgagtctcccttccttgaacaatgtcctctccgcctcgtcgtagtcgtcgtccatgatctcccccgtcggatgcttgacaaacagcctcgcccgtcgatcgagcaacaacgactcgtcatctaatcccatggccaactcgtcccgtctcaacctctcttcctcggtctcgcggtgcgtctccttgattacggtgcccacgggaagctggacgatcgtgtccacaccgttccgtccatgtcgatacgacccagagccgttcgcaccgttcgccgctcggatccgtttggggacgctgaccagactcgtgacatggggcgaggtcgtaaagtagacgttaccaccggttcctccattaccacccgagggcgggccgaccgatgtcgatttcacggggacgaaagctgctgcacctgatccgccaatacctggaatcatggacccagcatcgttagctcgatgttggagagcgggaagccgaagggaacatccacagactgacctcctctcacggtgatgaccgcgtgatcgatgaaactagccccatgctgtcttcgtttctgatccgcctttcgtttccgtcgttgcaagtcccccgcatggtcgccgaatccgtccgatgtcgaagaggcggcttcagaagaggtcgtataccgtctgaggtccgatcgggtgagcgaatggatttgccaagggcacctcgacggtatccggcggcaatacagcatcatcatgctctcgttccagggtgttggctgccaagcgtcaggtagactggagatgtgaagcgttcggtgacacataattgtagctttgtagatgaatcagagtacatctgtgtgaatttcctgaaaaggtggaggtagctaggtcgcgtttgctcgctcaataaagttcagattcagctcgatgatgatggcaatttcatcgagcaaggacgtcatgttcatggtcatggccatagtagatcgacgactttccacagtaatatcagggctgacatccaggtacaggctggttcaacattggatcatacagaagatccatcgagcgagaattccccacatgcatgcaggtcgataccaccccaccctgacaagcctcggtgaggaggcacggtggtgcattgatgcgtttgatatgccgctttgtataccatattgcctcagtgtaacattagattacgcttgtccggcaatgtatttgataaatgattccctccttcccgagtttaaagcggtaactatcatgttttgtgatatgcgatctactttggatcttgtacttgagagcacaaaatacacaaaactatcgtttcatagagcctactctatcgaaccaactacctatagcatatcgtctggtagtacaaacccgacgcctagctgctacggtactcttcactgcaaatcctggcatatacctgtaaatcctctagaggtccccgtcgcacgaatcttccaggatgtccacttcgacactacccgctagcaacacggcctatgggactcgggagtactggtgagcaagcgatcgttgtccagcgtcatgcagattgcgagttgatcgggaattgattggtatcgtacacacacagggaggaacggtacgcaacgtaggtatcctaccacgattccccgttctcaaacgcagctgaccgggacctgaccatggggacgacgacccatcacccagcgaaggcgccgagacgacgttcgactggttcctcaaaccggcctacctgatccccatcctagagccgtacatgccgagagggaaatccagccggatccttatgctcggttgtggcaatagtaccctgggtgaagaaatgtacgatgctgggtatcacgagattgtcaatatcgacgtgagtcgccaggttcagttcctcgcatacagagggaggaacaggaggctaaagactcctcgtcatctcatgtggccggattagtactcggccaccttgatcgaacagatggttgggaaacaccaagagacgagaccggggatggaatggctcgagatggacattcgggacctgaaattcgaacacgagtcgttcgacgtcgtgatagacaaggtcggtcggatcggatcggtctttcaaggtgataatcatcaattaagaggcgcagggtgttgatggattttctcggtacggctccgatagggcacaatggatgcgatgttgacaagtaaaggcgacgtttgggtacgtggacttgtttccagcaccggtcttcgagctatgttcgctcaatgggccacgaaatcgcagaacccatccgaggaagatgtcaagaactgtaacgaagagatccgggaggcttgtcggcaagtcgtcaaaagtgatccggagcggggtggacgactttagctcacgagcttttcgaaccgtttcagggtattacggaaacgagaaggatcgatatttctctagtaagcctcgccaaccctcgtcgttcggtcatcacacccgttatgcgtgccggttcgacctcgctctagaaatccgtacccttcttcgttcgcctctaatcgcacaaaattccctgcagcgcgacctttggacaacctcattttcgaaagcgatacatgcaaggtcattctgggtttgcactcacacacaaggatatcggacctcccgaaggattcagttatttcttgtacgagcttaaatggaccgggagcgggacgtcctagtttacgatcgctttggacggcccggcctggtggtgtcagacctcgttgacgacgtcgaccaggagaacacaggcaatagcctgcatgcctcgatgatctcgtcccaccttgtcgccgcctccaaggtgacatcccgcagagcgtgcaattggccggtgcaccttaatcagaccacacgttgttacacgagttttcatcggccgtacaaacggacgggatgaacgctgtgaccgaaaggcagtgccaaacatagattctatcgtcataatcatcgtcatgctatcgtatgccatcgaatggtacaacaatttctacttcacgctgtttcgtgtttgaaacgaaaacgagacggagttgggaaaaaagcaagcggaaaagagaaaaaggcgaaaaaaggctgattttcagtgcgagaaagttcgagagtgatgtagctgagagaagaaatcgcatctataggagtgatatgtcgggctcgtcggtatacgacggcaaaagagagaaagaggtgttgtcacggtcgcaagttcctttatccacgggcgtcaacctccatggctccactatctccgggagtcggagtccccgctcgactgagacttggcaacgttccctgtccctgaccttgacccttgcccaagggaggcagcttgttctgactcttgtcgagttcgtcgggcgacgtccatccaggcacatatcgaggttgtctcggtggcgaaaacggcctcgcctcggcggtcgtgggggatcgatcgtggattggcgtcatgccaaacgccgctcgtacgcctcgcgagaggtttcgcatgtcggtgccttgtccagccgatgggttcgcgggtgcggtcgacgtgccggggctagcagctcttgactgcgcgggactgttgtgcgacgaagcgggaaccgactttgaggcgaaatgactggcaaacgaggtgttgggaggcggcaagattcgatccgaaggcacggcaggtgtgttcagtatatcctctaccgagttcttggaggatcccgattggggctggttccaaccggtatgtgattgcgagctgatctgcgagctagaatgcgttcgtgccaaccttggcggagggctggcccggttgctgaccgaacctcgaggatggctgtgaccggacaagctggccggggtcgcgatggtgtggtgatggccatgaccgtagggatgcaccttgtacttggcatccctggccatgtggctggtgtgtcccccatgtttcccgctgccagccaagtgtccctcgtgatgatgctcggggctgttcgcccgactcggcccgcgagagtggctcggtgttccgctcaacgaggtcggggcggtgaagcctccgaggtgaaggtgaggagcatgtggtccgtgacgatgcgagtgtccactgtgcgatccgtgctccatcatctgctgatgatgatggcccgagttgggagggaacaagctcatacttttcatcgagccaagcactgggctggtcaagggagtaaagtcgaatccttgtccgacaggtctcgctgggtcatcaaagtcatcgtcggatgacaccgaggcgggagaagccgcggccgagttgggattcgagtggaacgtgtgtccttgtcgatgcgagtttgtaccgggttggcgcgaagtctgctgcggagccggggggttcatcatgtacgacccgctgggacgcttgaacgaactgggagccgaagacgagccacccgtttgagagtaaccatgggcactgctctgggatttgagctgggcgagcaacttttgctggttctgtcgctgctgagcctggttggcggcgagtcgttggagatgttgctgaatgatctgctgctgatgcatcattccacccagagctccgctcccgctgttcccaccgctgcccatcatccctgctccgagtgaggcaagatcctcatgcgagccagcaaggctcctggtttggggtgtgttggagctggacgagtgattgctcccacctgctccgggaccggcggcggcgttgttctggcccgagcttgcaaagttggccgcggccgggttgctgagtgtcaaacagttgggacaagcctgagtctgcttggcgagcttgagcctcttgcgatagctcttgtggcactcgtcgtgatgacacgtcggtggcaagaggtaagtcggatcggcgagcgtgccagcagggacggctccgtgcaaatgatttgcaggctgagcggccgagaccggatagatcatgttgggctgaccgaacccgccctgtgacgaagcgttgggaccgttggcctgcaagccagcctggtacgctgcagcgatctgctgcggcagacttccgctacctcgttcgttggacatgcccgagtatgggttgggggtcgtactaggcgatccgttcccgctgcccgatccaggctgaccgttgccgtgtttgttgttgttatttccgttatggttgttgttcccaccaccgctggacctattgatcgacatgccggaagctgctccgctcatcatctgacgatgacgcatctcaaactcggccctcctcatcgcttcccctcgctccatctcgtagagttgatccgtggcagcggcagccaaggcgttcatctcgttgccctgcccgttctgaccggacgcgagttcgggatcgatggcgaagctcatcgggtgtacgttgcccgagtaactgtcacgatgcccctggttcatcgagtagtgcgcaccaaacaggttggggtcgttgggatagttgagaccgttcgatccggtgcccataggatcatccatcatgtgctgctgcaaaagtggcgtcaatttcaaggcgtcagatcggtggcctttgaaagcatcgagaccgatccctgtctgacagcccgactcacatctccaccgtgtaccgatccggacggcgtcacgtgtccacttccgggccccgaatggtgccctccctttctcttgctcctcgagctcccatgttgtccctgatccatcgactggctcgacatcgagttgccacccatcccatcccctcccatcgacccagcattcccattattgttgccccccgcggcggcggcgttgttggcggcattgatcgatgcggccgtggcgttgggcagatggatcctggcgtgccgtgtcaattcgtccgacctcgagaaccgcttgtcgcaccctggatgcgtacacgcatgaggtttctcacccgtatgtgttcggatatgtcgggtctgcaacgacagacacacatacacacgacgcgtatcagtttcaattcagatgatccctctctctcccttgtggtcagaggggggtgggggggatcgcgagactgacctgatgctccaacctgtaaaacgcgcgatcacacaacggacacttgtacggcctcgggatcttgctcttgtccatggccaacgccgcctcggtcaacgccttgacggcaggatcattcgggtccaacctccccgtcacgggatccgcagcggggatgagcccggaatacgtctttccccccgaagaaggtgcgggtgagtggttgttgttgtggtgagagctggatcccccagaaggggtcgatgtgcccgtattgacaccgctctcgaggtgatcatgcggtcccgagctccccgcgtcgaaactgggcatcctggatcctccttccgatccaccctgttgctgctgttgctgatgctgatgagaacgctgcccctggtgttgttgttgctgctgctgctgctgcatctgctgatgatgttccctcatcgcatcctctttggcagccgcagcctcggcgacggccctgacgacgggatcgttcatatcgacaacgttccccgccgccttgatccgctcgagtacgctctgcccgctcgccgacgtctcgacgccttgcatgttcatgagcatggtcgaatcgatcgaattgatgttgcccccgacggcagcgagggcagcggcggtcgcgatggcccgttgttgcgaatttggttcaggcatggtcaacgagtgtctgttcggtgcggtgtaagccttgaccccggaggggagatgtgacagttgcagccgtgcaagtggggagaccagaccggaccagaccaggtcgatgctagatcctgatcgacttcgtgcccactctcgaacgtatccctcgaaccgatctgtaacgtcgtggacgacgagcgctgaacgtccagagaaggtgtgatcgcaggcctttcgactatgtgtcgacgagagtcgtgtctttacgcctcgtccgtgacgtggccgtccacgtcctatcccgagtgattcgttggtgtggtaaacgggcgagtgagttgtgctatccggaccagagacagagtgtcctttgcacgtcctttggaaatgcggtacgagagacttgtcgataataatgtgcccgaccaccagtctactgactattgcggggtgaggggggggggggaggtacgaggtaagggtcgcgatgtcgtgggataggcgtgatccggtataaagattttccccgcgaatgatcggatcgggaagatggacgaggtgggacgtacggcggggtggcaaagtcgagcgtcggtgggatggcgattgggaccgtggatgaatgcgccgccgccgctgctgctgctgctggtgctggtgctgtcggtgacagagggtggttatgaagaccacgaccttgcagtaggtagtgtgtatactactgtctgacagctgacagttagggtcctgacgagaatgtgggggagggtgacactactggttgtgctactatctcgtgtgtatttttcgtccgaacgggggaggaagatcggggaagcggaccagctgtcttgaatgagaaatcaatccaaccgacgtatcgttccgcgcggccgatagcgacagcgaaagtgagaatccggggaacgaaaaaggaaaacagagagagagagagggaaaataagagaaaataggtttgaaaggaaaagggagagaaacgtgatcggatgacgacgacgatgaccttccgacgggggcgtgcctcgttccaaaagagacaatcaaaagtgaaaaagcatcgaatcacaatcgtcaacccgcccccacctactaccacccacccatcgtcaaaccttctcatcccaagagaccgacgccctgtacacactcccgaatcccccaccccgatcagatcctcattgcgagtctcgatcatcgtccccatcactctttttcccaacaaaaggtcgccgcggattcccagcttgaaaagggcgctccgcatttcccgcgcgcgagcgagagagagagagactcaaggagaggacacgttcacccactctcaccaggctcggacagagtccttccgcctgctttttcgagctagctattgccgcagacggggcccagccgagggggttataagcaggtcatctcaccgcccgcttcgtcaccgcccgtctctgccactaccttccgttcgtaggcgagaagcgagaagcgtcttcttccgctccggagagatccccccgtcctactctttacgcgcgggaaacgtttctcattccacagcaccccgactcttctacttttttcccgtcttttcagctcatcagcgattttagacgacttttcacaaatttcctttttctcatacttttcagcgattccccctgggagcccccatcgcgagtgtgctggcctaacgcgcagtagcagcagcagcgtgtacgtgatcgataccaagaaatgccccgccccccttgcacacttgacgcagcgcttcaagataacgatctccatctcgatagcatgtcatatcataccgtgacccgcgtgctcgtccctaccacaccatgcgtacacccccccccctcaggcctcagggtacggtagcgtgaattgtgtaatgtgcaaagtgtttattctcagatcatgcgattcctacggaggtccaatggtgcttttgtccggttactggtatagaaactaggcggagctacatcttatcggaccgacccgactcatcgggtcaatcgatacaagcgataatgttcctcacacccctattatcattgttactgtcttcgtgtatgttcgtacattcgccgtctacgcggttgtcaacgcccggaacgaaagctcgtcgaactcgcagtcggcgcaccggaacatacccccgctcttccaccccttacagctactgtgccgggtgtacgtgtgtttgtatgaagattttcatcgatcgtccggccatgacccaaatagtgggcagggcgttcagtgtgcaaagaaggaccagagccgcaagtcagctgagctggggccggggagggcggtattggatggtcccccagccccgttcaccccactctcccctcccctccctgccctgcctttgcatcccttgtcctcggtggttgaagcatgttcccttgaatgatgagaaacgctgaaatggtcgcttgttgacgctttcgggaagtgacccagtctcaactataattctaatataaggatagagatccatccactcatggccactcatcaatccgccggtttgccacctatcatcatcaatcaacatcgccaccaccaaccgactcgtcaagttggataacaacgccgaccaacctcatcaataccgatacacaaaccggaccatcgacttatagccaataacaagaccactttaccactacttagctacgaatcgcccatcatgccttccgaacgatctctcaaggttctccataccccatggctcgtcctctcggtaagcgtgccgtactcatctctctccgacatcgtccgaccagctgatcgcccaaacattttggacattgctatacgctctgaaccatttcccggattcactctgcagaccatcgtctccatcgtagcgctcgccatctcgggttccctcgtcgggtactacaactcgaacggctatccggcgatcaacgggcagtacaagccgaggatcaggatcatcctcgtggccagcgtgtggatgtcggtatttagcagtgagtcgagcgaaagagaggacggggtgttgggtctcctcaacggcatatgagggtggacgagagatcaaggccaaagatagctgatcagattccttggcggttttctccactggcctttcgacccgctcgtcctatagtctacttgttggtcggtttcctgctcgcaccggggaacatcctctttgggatcctcacccactgggtcgtccttaccatcggttttgtgagtcccggcctgctcctcaactcgcacttttcctcctcggaacccgctcctaatccccactgttgtcctacctcgcagctcttgttcttgatcggaaactcgtccctgaccgccctgacggacgggacctcgtgcggcaaggtgggagacgctttcaaccggtgcaagatcgtcaagggtctcgtcgtcgtctcgtgagtcctcgtttcttgtcctagttcggggactgccgcgctttcggtgcggtgcgctgcggtgcaaatcatcatcgctgatcctggtaatctcaatccctattcgacgtccgcccccctaacaggtggatcgacgtcatcgtcatcttcgtcatgtggatctttgtcaccctgcttgcgttcaaggcgaggaaggctttgggcgtacacaggagctcgttgctcgatgcctggttggcatggtagacgcttccccccacagaacaaagggtgtgtcgtcgtccactggaccgaggcgaatttcgcgggaacgggcgaccgagcggtcgcccctgggtcgagcatttgtacgagatggagacgaccatgtagaaagtggtctgtgtacgcagttataatatacgtcacgatttgatcacaggacgagatggataggagaacggggataggccgcttcgggatggactttgggctatagctcaagacgtcccgaggccgtcttccgtcctggtccgggtgatgagaacatggctctagcaggagtcattctgcgatcgtcgccatgcagacggtcccaactggtactaggaacaagattgtatggtacacgcgtagaccaaaggtcgatgtagcaacggtcgaggcgacatctgccccctactttgtaaaaatgctcacgacatcctcgttggcgacgacatgcgacaacccgaccttttgaggttgcggtgagaatttagacgatttaccccagaccagagcgtatctgcggggaaggtgtgatgagcaagcgcaaggcagactgatccacgggaatcgaacactgacttgaaatgcgaagccaaacttcggtgaaccgaatgacaaacgtcctcgatagtggcaccaggtcgcatacacacagggtcgtgcagatcgggcgcgaaaccacgcttcttcgtgtagattctgaagaagaaaaaaacaggagtcgaaatgagcgcgtttcgtggagaagctaggcggatgcgatcaggaacacccacttgacaagctgcagttcctcccaaatccggtccatcagggtgtcaagacccagacccagctcagcactgatcacgacgttcctgccatcgttctcctggcagatctcctcaatcgtttcgatcgaaacggcgtcgaccttgttgaagacgtaaagacaagggacgtattttcgggtcccgagcaggacgtcgatgaactcgtccggcgtgatctgcatcgcgaagtctcctactcagtcggcatagaccggaaaaagagcgcgataacgagacgacccacatcttctctcagcatcacgtcacagttgctcactgtcaagatcaagatggccggtcagcttgacgaggctagagaggcttcaagcgtatgtcactgactcttgtacgattgcaggatcgacttgatcatgcgctcatcgatctttgtcagcttgacagtgttgttgatctgttgacaatgatggtgagcacggcccgtatgtcgaaaaaacgacaaatcgactcaccgtgatcccgccggcagatttgggcttgaagacgactggagggcaataccgatatcaaaggagtcagatcatggcaatcttgatcatgtccagccttttgcgtaccatcgggtggtgcggtgttaagcctgataccaacagcttccagctccgcttccaacagctttcgctgttcattcgactttgttgcgtccactacgtttgcagaccgtgtattaaagcactgtctaactgtctctcggggtccaaaaaaggccacactcactcatgatgatgataacatctgcagtcttggcgacgctgacgacttgacgaccacgtcctcgacccatcgcagctccttccacgataccgggcaaatcgagcagctgtatccgtgcgccttcgtactccaaaactcccggaatggcctgagatcgggcctttcagctacatctaccatcaaagtttgggctgtaacacgtaccgtcaacgtcgtaaactcgtactgacattgcatgcgaattagacgccatcaatcgcaatcgcagtttgatgtggcaacattcgtacgtactgcacctgtgatactctccgtcttggtcatttttgacaataaagtcgactttcccaccgaggggaaaccgataagagccacacgagcatctgttgcaaaccagatcagtcatcgatatcctggcaatgtcgtcggcagcccgaccggctcggcacgcacctccactcttcatgacatcgaaaccttctcccttggggcccttcttgtccggctcaagcaactggtgtcgatacttcgccagcttggccttcagtgtacctgaaagttgttcttccgatcagcattcacatcgactctcctgactatagacgccatacgtacccaaatgatactccgtcttatatcattgatcgagcactctcagtcagcatcatggttatccaaagtacagccttcaggacgagacccaccgccttactgtagttccaaattcatgatcagctccctgttcagacagcgtcacccgagacggtactcacttcttctgcgctgaaagtttgcaaaattcacagccaagcccatcagctaccggtctccgggctacttagctggtagacactcactcctcgccatctcctctacagacggacgtatcgttctcgattgtcagcctggccatcactacgtagaactgtgcactgcggactgactctcgatctcggcaatctgaggaaccggaatgagatcagcttcatagaatgaagatgcccaattcaagtcataccttctccaagacacccattttgccggttctcttcttgttttctcgctattgcctaggaagagtatcgctcaaggacagtattccgataattctgtcagcgaatatcaaggaagtaacgaagtgaaactggctcttgagcagtcgcatatgtgctcatatccgttcgatctttcatggccatcgccgtctcgcttcatcctccactttatcaacttcgcgcgctttgccgacgtatggggtcgcgcttctctagcaaatggagatcggtctcacggctggactactctcgatctcaagctcagcttatacggatagaaatggagagagggtggtattctatatgatcgatctggacggtctcattatgatctgctggagatattgtctgcagctaaaaagtagcattaccctgtctcgcccttattaaacagcttccctagccacctgctcttcttcttcttgagcgtcttggctacttcctgatgcgaagatgatacagaaggactgagagtgaccacgtcgggagtattgaatccctcgacagagcggctatgggttgaattgtccccgctcgaggccgatgtctcgttatcgtaatcaagcggtggcgtcgtcggtatttcacggcgtgaatcgtcctgtatatcaggcaagacggtgtcattcctactttgattgtcgctgcttagcctcggtggttcgagagatctgatagactttgcctcgctatccgtaataccggtagcgacggagtatgggtcgaaaaaggctgacgaagcaaggtcagggttcctctcctcttcgtccgatcggtcgtgtggacccagctcgaatcggcaactcctgaggtcatccagatacgtcttgtcgtggtgactatgacagctgactgcgccgctgagcatcaaagcgagtccggaaatgggtgacatgtcgctcgcccgtttcatgggctgacccaacactcgacttccaagaacgaacgcccttggagccacgtgcgctgacaagctttctgcagtcgggcgcgggaacaaggatttgaggtatgactcggtagccttgatgagagcaggcgagggcgccggcgggaggacgtgcaccagtgtttgaggcatgtcaaccaccccgaccggaaagatgttgctcgaaaaggacgaagtcctggctgacgagacgagcgagtaagctgaattgcgacgtttcttctcctcggtcgagtctgtaggtgacatccgtatcgaggacggcatgaacggtaaaagtgccgtcgtagtgactaggacgttttgtaaagtcccttgcaacgagtctgcgcgctcttctgccggcaggaaattgaccaccgcatcgagagctcgaacacgctggttcggttcagtgaccgacccgtcctgtgatgccgtctctacgtcctccttgttgatcacggtcgccatcgacaagacgctcgagaaactcctggacaaggtcgatcgcctgtccctgccttccaggagctcaacgctgggtctcctggtatgcaatggcgaatgcgttctcgatcccatcgccacctgatcgctgtggctcgatccgcgcctggaccccagacccagtagggtaggctcctgtagatccagatcagtggtcgccagtagtttccgttttttcctccaagcgagagcagcgtcgacggcctgtttgacgacgtccccgatcgtcttcccttctttcaacgtggggagaaattggacttcggcgaggcatgtggatccaagggttgccaccaggtccttagcgtccaacccatttgtctttttatcgccgggaggagacgtgctcgtcaattgtgacaagggcgatcgagacgtctgcacgagtgtcgcatttggtgatgaagagtgacgttgtccgaattgcctgctcgtgcgattggacactggaagcccgggtaccggccgggaggaatccttggtcggcgaggacgagcttgcgacgggcatggttgggacagcgctgggatttcgcgccaggaggatcagggtgtttgtaaaatcaggcgaggtcagaaccggtttcaatgcggtcggacttggttctacgcggtcagggtgaccattgagtcgttatcgtcagttccttgtttcgacgaacagcacgactcgatctatggctgacctcctaacatcaagatgaccctcgatttggtgggtcttgtccattccttgattccgacttccatatcgtccagatcgatgacccaatcaggcctcgtcttgttcctttccaccctctggcgttccctctcaagggtaaccctcgcttccgataatgctctccctggtctcgccaccggggtcggggagggcggttctagcaactccctcgatggcaggcgaccaggctttgatctcggtgacaagagtccactgctgttactgttgaagagaggggaccgccgcatgtcttgttcggccatctcgaccgacatcctccttatcgacccgccgacctcgctccttcttcgtgctgctctcgcctgatctttctgaaattgagcctgctgcgatcggagtgacctctttcgaccgagagacgagtcctcgggcacgggatcgagactgttgttacgctgcttgtggtgtgatggggacggtccggtgcccgcatgttgggagggaccggcgagcggagacggtcccagccgttgagttccgaattcgtacattcctgtggcgagccgatttgatcgttcagggacgaggtgatcaggtcgttgttcaggcgaaagatgtccgtgaagttgatgcgctcaggtcgcaaggggacttcgtaatccgtgatgatcgtcgggttggctcgatccagtagtcaggcaacaatcgaggtcatgccgaggttccagcccgaggcgacattattagatatagcgacccgaaatacgcacgagcctctttcaagctgacgaaatcgcaacgtattctgaaggggtcatatctcgcgttgatatgaaagggatcacacaaggaatgcacagaccatatgataccattggtcagggtatgtgacgacgtatgaaccgacttggcatctagggggctaggggatcgatctctcgctctgccgacgacgcatcaaactgcgcagtcgcgacccaggtcgatccgccttcgtagccgcaccggccgcccgaggtgctcgtgtgcgtggccattccgtcggtcaattctttgctcccttttcattctcttccccacacggcggtccagcaatgggatgagaacatgcgatgcggcatgcagcatgatcacgatgcccgatctgtttcttaaaaccgcagccggattccagggcaaaaggtagggagagtgacccgctggcgtgagcctgggcgtgtgagacgaaggattagtcgccgcaattcaatcgaccgcgggggcatgcggcatctcgttcgcacagcaagccacccgttcccttggcacccatgatctgtgggccgacgaaacaacgtcaatggctgcccttggctcagggcctcggcgggatcgaaaccgtggtcgttacgcaacggatgacatgatgatggacatgctgacatgtgaacgaatactacattgggatcggcgttgtcgttggtgatacattgggggggagtacgcataggaagtggaatctatcgaagcacgttcatgcgtctgtgtcgagtgaaagagtatccgcaagagagcgagtcagctcagcgctgggcacagcgttcactatccataaactcgtgctcacaatacgaagtcccggaaatgacaaagctcaggttgctcagttggtcctcggtaaacttcagcttgtcttggtgccaagtgtcagcgtgcgaacgctggaacgaagccgcacatgcccggatggtcgagctgatcggcgtcgggtccgaggcatgctcggccagaatgtcacacaacaggttgggtaggaacttggggatcgagtacgggaatgcctcgatgctatcgaatcgggtcaaatcaaacagtcagaatatgaccataacgacaaggccgcgtcgagtcacccgacgagcacttacagcgcggtgatccccaaaatggcaccgtgtagcttgataacggccgcctggtaatcggggttcatattgccggcggcatcccgtttcctaggcagcttggacgccttgacctctcgtacgaatcgttcctgttggcaatcgccatgaacgaaaagaagacgtcagtgacgaccgtcttactgctagcaccggaatccttgacgcaccttgagaacgttgatgctcgccctctgcgaacatctcagtactcccgacagggtgctatagtaataccgcatggccccgtcagatagagcccgacgtcgtttagagtcagagtgatgcttacgctgcagctgtctctcggacttcctggttgtcgtcgtgcatacattgagccagacactgcacggcgaggagaagcatcgtcagctcggatagctggaaaagaccgaatcgaggtgagaccactcacgtccatgattttggcggccatctcttcatctaccagaggtagctctcggtagtagacgatactgagaatgggcagagcgtgtaaccggactttccatgactgtcgagaaaagcgtctgcattcagcgccaagacggcatgccatgcatcccagtgttgatcacttaccggcgattccttcaaagtcttgagtagggattcgatcaacggtttcacgatctcgatgggaggcgtgacggcggtaacaaatacgaggacgaacgccgccatttggtgaaggtctttggagtcgaccatctccctcatctggaagatctccggtctgtgacgagtgtcagagcgatgagctatcgtgctgttcaagcggagtcggacttgcttacaggataggtaacacgtaagagaagacagcaggcgcatgaatgtctgacagtccagagtagaaccagcggagcagggtgccagccgtacggtcgtacaatgacagcgaagcttgaggcccggatggtcgctccgcacgcaattcaggtaatcttgcgacgagctcattaagttggggtaaaaggtggccttgcttgccaataatgtctttctcggggttggccagacagtctgccaggaatttgcgaggcgagtcgtacgacggatgccaccgcacgttgtccaagcacaaaatgttgctggcgactatcccgcgaacttcaacaaagtcgctgctgctggcctggttgaaggaaatgtcgatgaattcatccgcccatggctcgaatctccatccgagacatcggatcaacgaggataccattgatgtcgccttcttgatctcgaaagcagacccgttggcgtagtcgacggaacggccgacttcgaggaggtaatcagctaagggctgcagacgtcgaggatcccgttggaagaagacgtgctcgaaacacatcttccagtactcgaacgtatctggacggatggatccgtatatcttgggcaagcgaggaaccagccattcccacaatccagccctcgctttaccggaccaatgcttcataccacgtagaatacccgagagaagttcggccaaagctcgttgcttgtccttgtccgttgtctctaacaattgttccatgactggcttcaaatgttggaaaggcatgtccgagtagatctgacacagcgagcggagaagatcgatgttgtcgccggaaaggtaattgcgggtcttctcttgcgcccagttgtcgcagacggattgccaccaagcggggtcgtcgacataggccttcatcgcagcgatcgcctcttgcgaagcttcttcccactggaaggcttcttcatcccatttcgcaagtcggctctgcgccacctcctctccccagcacagccagccgaccgagcttttgtcctgcatccattgatcctcggccgcatggtcgtcaattggctggcggaaggcatcgaggtactgttgagtgaaatcgtcgccgttcacctcgggcttgatccatcgcttgagcgggttcttcccgttttgcaagaagagggcttcgtcagaccctttgcaaagcgttcgaagctttatgaggtatagaattcgggtcgtcgcaacctgtgcgtgactgcgtagcgcgggttgcgggtcgggaatcttgctgaccatatagccggcaacagcacccgaagtcgcgacgtccctcctgagcatatgtcgaatcaagcgagcggtagtgaccgtatacttccagtgggtggcgggatcttgacaaatttccagtaactgtggtatcagtgcatggtatgcctgattgcgatggtcgcgggacgcgaccacgcccgctgccaatgcctgtctgagatctagagcgatagccgaggcgggcaactctgtagcgagcagcttcaacgtggactgagctctatctccgcatcgttgacccatcatcaaggtacttggctctcgcaggatgtcgatggcgtcatccagtaaaccacccactatcgactggacggagggcttctcttgatgttgcgccttgagcaatgccatcatgtagggcgtgaagaagcgcgaatcgtccagcgcgaaggtcaaaattgaggaaaaattgaggacatagagggcgcctttcatcacgtcaggatcggtgctggccgtcagcgatggcagtacgagaggtataaccatggggatcaagccctcgtatgtgccacagaccgagctcaaggccacttgagcactcttccggactttgacgaatgacgagatagagagcatgaccaagtccttgatgaggagatcgtcgagatccgagcgaatacggcgctgcgcgttcaagcggtgacgaccagcgtgatagatctccatccgacgaatccagagcgatcttggcagagacttttgtgctttccaggatctcacttgcttctccaggtacacgtgacctttccacatgttcgcgtacgattttggtccaacgccgtacttttcaatgagaactccgattgatcggacggtcaaccgaatagaatcgattgagctatctccgtcgtcgctccggaagacgccaactgccttatgcaagatctgcccgaaccgtgctcgatgcgctagcatctgcttgtagatctcagactcaggatcgtgtatcggtgtaccattcgagtaaggggccggggcatcaatgaatgcagccggtacgtgtctatatagaggaagtccatgagcgggtacacgccgagcgccttcaagagatctgcgctcacggtgccaacgaatgttcctccccgccagtcttcagatcgctgtgttcctgccaagcttgagacaaggcgccgatactgaaacgaacatgggaaacgtatcggcagaaatcgttgttccattcgagcgatgacgatgggctttgcaaaaggctttcgagcttctccatcatgggcgacaacatcctcaatagcctcgaaacgaattcaagctctggcggcagcaagacggagaatcagcatgatcacgatagacccgggcccaaccggacgactcaccgttctcagcgggtagatgccaatcgacctgcacttcggcgagacggtatgtcttgccccaatacagatgatggttgtacttgaaatctttgtaagattgattgtcagcctctgttcgtcaagccattcgacgaaatgactctcaccgtccgaattccattcctccgggttgaccagcctagcctcatagggaaagacggtcgtcatgttgaaaatgatcttttccatgagtttcccagtccaagaccaacaagcctcggacaaggttttgtccatcagattctgaagcagggacagcagttcttcttggtggtctaccaactgaagaagcgaaacgaatcagcccttgtgtatggtctttcgacacaagcgcaggacttgcctcgatggacgctccagagagagctccgacgagcaacgacacatgccattgtagggcaacgtcggatgcgataggtacggtggagtttagagtcctccgagagcctgctcccgaattgagttccgaattgatgcgtgtagcacacaacggcacaaactttttgagagtgtatgccggattggcgttcgaacaggctaaaatcaaacctccgattactcgtagagagttagatcgaacggtcgttgtgacatggtcatagacttgatcgatgatcttctcagttcccgccttcgataagttggtgatgatggagtccatgagagactatgcaaaggtttccgcatccaaatgaatcagtcgcgatcattgcacggctctgtctcgaacatacattgacaaagccaacgatccgctcttcgctagagattcccgccttaagactgctcgtttcattgacttcaggcatattgtcgtatagcttgaagatccgttgcaataattcggtaatccaagaagaaaagaccccagtcgactgtctgaaatacatgtcttcttcctcttggctgagcatgggttgatcctcttcgtcctctttaagatcgacagcaagatccgctcgagggtcttcggtccgagcaccgggagtcacaccttccgggacttcctctggcaattcctccaagcggatgtgctgaatagcgttcatcaagaacaacacggtcgacagctgtgaaatgcattattttctcagtattgcaggtcaagcgacctaccaaatcagacgcttactgtcttgcccgggtcgttcatatcaatacctggaagtacgagctccaggatgctggggatctgcttctgaccagactttgagacgttgcgtgcggtcatcgaccaagaaacagctcccaacgtcttgatgacagcgttggttcgggcggtctcttcgagatttgtcaaactgggtatagcgcgctcgatgataggcgggatgatgagctccggctctagcacggacaaactcttcaggcatgatcggcttgcacctccggcagtggcatctttgctgaaaatgctcatcaacgcgaccggtcgcaagcagagcacaaattcttgcctaatggcgggggtgagcctccattcgtgcggtgtcttgcattggggcatttcttcctgcttccaacgcgttaggaacagccaagcgagatcctgaatgaaagccgtaagaacccgtgtccagccaccatgatttgaaggatggaaaaagctttcgcagcttgtaatgagttttgcaagatgctcgagcgatcgagatccccctaagtacgtcttggttgcttcggcttttctacctgcgtctgccaagctgtccgagctagaactggggtgtagaccgttgagattggtcttcaccctcttcaacgcttgatgttgaggtgtagcagtgcccggtgtcgctacactagaattgggctttgcaggtgcatcctccgccatggagcaaatgatgatctccgccagagccactgcgaggacgcgatccgtattgagcgatttccgaacagggtgcagagcgcacgagacttacgaagcctattcgtcggctttctcattgccagaatgttcttgctcgccaaagagtcctgtaaggaggcatagcgtgttagccgcttctctctcggcgcaagcgctgcgctggcctgccgtccacctaccataggagctaaagcgcctgcagctgcactggcgacagatccgccaacaggagtacctgaccacggattattcatgtgtcaataccggacacaatgtcgcaagcatcaggacctagactcactcatcgcccgtaaacacttggtcatcacagtttggaactcgctctcggtcaggatgccgatatccttgcgaattccctgccagccagcatccttgttggtcacatcctcctcggcctcttccccgtccagatccatctcatcgccgtcgtggagcacctcgtcctctggcacctcattcaccatgctcttgggaatatcttctagccgtttcgggctcgacagagaaggattgaggtggatttttgatagattcgccactatgcaaagcgaaggatgtttggttcgctcatgttggttggccttttcttgtttatgaccacggttaaacttacgaaggtctaacatctgttcatcgtaaaggccactgttgataccgtcccaaagcttgaacactgtggctcacaactacttcagacacggttcctgcacatcagtggatcaagcccccttactggttggaagccatagctgaggatgagaataaggcatgaaatggacgatgaaggcttgcgtggcgaggatcgactgtatgttgtggcaatcagctaggctgtaattcgagcgccataaacacagcactcacgtcaatgtcgtctcccacgaatcgaggaaggatcacggaaagcatctcttcgtactcggacgggtggaagaagcgctgtgcaacttctgccatgtcaagcaaaagattcgaaacattgctgtatgtaggttcatgcaagtgagatgggcaacgtgagccggagggtggtgtcagacttacgtatgtccaaccttgcgtcgctttgggaagagctccttcaccagtaaatcgtgcagtggtttccatggcaatcgcaggtcttcgatagagataagcttccgtggtctgagatggcaggacgacttagatcagactaagccattgaatgacggtatgaaggacaaactgactttagcaggcttcggaccatgtcagcggcgattcccatcgcctgagggtccaaaccaggcataacagcgagttcgtagaaaagagctcctaatcgtaccctcatcctcttcttcatagggtaccgcaggccaatccagctatgcaacccgggtttctggagatcagcttgcgaaccaaaaggaccagacatcgacgacaaccgacctttgtaaccttctagtccaataggcaaagggatattcccagtctcctgcctcgatgcagtccaccagtcggcctgcgatatgttcaagccgagcatccatctcctccagagtctcggttgtgtatggcagcgatcgagccagcaccattctctttcgccgagggtcggccttgaccttgttcttggcgttgccatctgtggccctgttatccacctcgagctgtcatcgtcgacgatcagtaccacatctcttgagggaaaggcagggaatactcacaccatcgagctcggagtcggaattcgactatttagaaagcgatcaggtagatcgacatcagcatggccaaccagcgctatgcctaattttgcagctgacctcgacgaagctctcatcatcggactccatcttggtggcgtgtctgcgattccaaaggctgttggcaacgagaagacgcggctaagccgtttgagaaccagaaactaaagtcgagatcttggtcgtatagaacgtaatgcacagtgatctcggctgagctagcagagatgatcgtcgttgctcttcgtgatatgttgtagcgtggcttgtgcctgtcagaccgagtagttgtaggtcgaacgatctgaccatgccatctaaagggtaaagggattccattgttcagctcgtctgacggtgacgaacctctgagccatagcgattgcgatcaggcagggaacccccgcctccacttgtacacgccagcgttccgagcggacattgtatacaacccccatctccgtaccatgtccgtgtcgctttcttctagtggtcatcaaatcataatcattacgggtcgtcatatttggtacagagtggcggcacactagctacagagtacagagaggaacggtagattagtcgagacgtcgaaggagatcgtattctttgcttgaattggcgcgctcagcgcgagtgaaacgaatgtgcaggtgcgtccgctgcgaaaaactggccggcgggtgatgacttgtcaatgagtcgcatgtgacattcctgaggtcatcattcaacaacagcctccgccgttggcctgctttcctgtggctaacttcgccttgctgtcggcgaccgagtcgaggtacacgctttccctttgtttacggagatgttccatggtgatttgccgccgtcgcaagaccaactgggcggtcatcgaggcgaagagctcgtcgacgcctgtacgttattgtaatctcattcagaacccacagaaatagatgcatttggactttcaatcccctcactcaccccggttgagcttcgacgaaacctctccaatccgtacctgagtgccgacaatctttttcccccagtagggatcttcttcgaaaagatcctcggccttcttggcctgagcgatctctttcttggcttcctcgcccgctttgtcccacccagcaaggatttctccagaacgacgcttccaattgttgtcgccactggcatacgcgctcaggtccccctgtatcgccttgagcgcctcgccgcgagccctgctaccactccagtcttcgctctttcttctcggcgctactgaggttgctgccatcaaattgagccccgacgtcgagcctgaagtcggcaagggtgagcgcggtcccgaagtcgacgtagagaaagacatcaaggccgctgccgacgccgagttcgacctggctccggttgcgcctctggacccaggaggcaaatttctagtatcaggcacgtccttcttgccatcgtcgctcgtgccagttggaggtggttgcgatgacagcagggacaagaaccggtaagccgccggtcggctactagccgccgcgctctcgagggcggttttttcgctcttcaaatccaacggtgagcctaccgtgttggagcgaaacagactggtctgtcgaggcctcggctgttgtgcatcaggtccaatcggtgacccagggcctgggctattcatccgctcaatgtctaagtctagaccgccatcaccgacgtccaggcccagccatctcgcaacggtgactctcgcccgcttccgttcgaccttacgccgatcctccttggtcagatcccatttcgctccaacaatgaagatgagaacctcgtcgatcatgttgcgcaattctgacaaccaggtctgcacgtcctcgaacgaggactcggaggtaatgtcatagacaataatcgccgcttgggcgcctgcaagcgaaagaggccgtcttcgtcagctttattgtgccaaaatcttgacacaatcgcggaactgacctcgatagtagagcttggtcaaagatcgatgccgttctgtcacatacgtgcatttcacctgatcagccttgatgaactctgccctttactaaaagcgaggaaaggcataccttccccaacggtatcccagatctgcaacctgacctcgccaccttcccaattcagctttcgcgtgaacaggcttccgttcaacgtgggccgtgtcgtttgcggcgagaataatccttccgcatacctcctcgccagcgtcgatttgccgacccctgcgtgaagcagaacggattagctcgtctaccccgatcactgctcgtctcaaatctgcgaggctcgccttgagatcctagcaggacaatcttggcctccaacgtctcctcctcgcttccccgcctcatctcgccctccaccctcaatcctccacctttcccgcgcaagaatcccgactttttcttgctcatccctcccgtcgtgatccttacacccttttcgatctccctatccctcagcctatttgattcggtaacaagggctgtgccggcatcgatcgatttcctggtccgatgacgggtcaagagcggggaagccggataatcgtccaattcgtctcccgatgggtctcctggagatcgggtcgagatacctgtcggcgtggcagagttggtcatggaaagagccatcgcctgagatccaaaggatctagtagaaaaggcacttccgaacgggctgttcagctgacccgccccggatccagccgcgctcatgcccggctcgccaaactcgtccgttccctctgatctggaactcgtcgtcgagttgatcgtcgaatgtagagatcgatgaggctgaagcaagaggtcccgatcgtcgtcataccgcggacttcctcccgcgcggtatctctggatcttttccctctccctttccaacctctccctctccctttccaacctctccctctctcttgctgccgcgctcatgctctgattcccgtgtttctgattttggcgaggtttggtcgagttcggtgtcgacgctccagacccgctcatcaatctcccctcaatcgagtcgtatagctgagcggagcgggactgagcttgagaggagaacgaaggaaaggcatatagctcgggtggcgaggtcgtctccttttctctgtccatatccttttccttatgagcaaccggtatcgtccttgtataccccatactctgacggctgtaacgtcgtggtccgtacgattccgccctgccctccgacttcaatctcggtctgatcccgttttgagccaggtgttgttgagcgaccccattgctggataggtcgggagagtaggattgatgacgcttggcgatgatcggacgtcgaggtggcggaacggtagattcgttcgtatggtggatcgaggccggagttggggacggcggggttggaaacgagatcatcgttcaaaaggccaggttgacggccacacacggacaggttgacggccgacgggtaagttggcgaaaagcttgatgatcccgaatcagtgctggtatatgctcgtccgtcctatccaaatcgtgcggacagccgtgtagcacgttcgatatcgccaccaaatgattttcgtctagttacggttacctttccgctcgtcaaagctcgcggacagagaaaagtcgcagctgcccgaatacgatgcaaatcttcgttgtcggcacagatcaaatcctttccgagtccatcatgattgtgttgggcgagtcggttagacttgtattgctcgcgaatctaacgaccaggaatggatcaaccgatgtcgtctcagttcgatgcgttttgcgggtcggtgacgaccagcagaccggcgtcgattccagctatgaggaaggaacgacaaggggtacgcggtcgtgacccttggtatcgaatcttgactcgacctgaccgcgaagcttggaccttgttcgggggatgacttgaagtgcgtacgacgttgtgatggatgggatgttgatgcgatctgattgatcgagacgatcaacggggaatcccctctcggtcgtttgtggttcgctgatcgctgtgccttctgcccgtttgttgtctttttcgctccttgttttgatttcaaaccctaatttcgtccaggcgtaccagaccaaggcgcacgacgagggaaagggctgtgcacagcagcgcgggggcccagcgccgagccgttccgggaggcttcttctttgttgccggcagagtactatgacggcatgatcagatccacctcgacttatcttatatcccccccgggactttgatgggcacctgacttagctactctattaatccaaagtgcgagactgacaataaatcacggaagggacgtgtagcatgagggcccagcgtggaatggtcaagatacgttgctagagtttcaccgtactcgacacctgagccgggcgtcttggatgctgatctagccgagatcgaacggaagtttcacctctcacctggtcacctcatgtttccatcaacgagatgtgatccgttacttagcgccgaaccgattgtttacgaaagggtagcgaagggcgatccggtgatgtcatgggaaagtgaacgagtgaatatgatcactttttcatcccgtatcctgtacattcgattcaccaaactcgcaaggctacgatcaatggtagacgatcgaattcgacgtcccggaaaaagcctcacctcacgttgcgccaatacctccctctttagcgacccttccccatcagaacctcttgcgaacctgtgacaattaggcttgccatcgactcatcacatcaccgttgatctggagagaattcatatcgggccatcgaaccctgtctcccaggagtgcacacgaaaaacatgcccatcgcaggaccacgaccactccctgaggctcataataggctgtcgcgctatcaagatgatagagatccgggtgaatcaggccgaggcgagtcctacacggccgtttttactgtttcgcctgatccctgatctctctcgctcaccggcccttcgtatatataacagctgagccagagttcatccctcttaccagtcctaccatccggtcgatcccgtcaatgagctcgggaactacccttcccttcccggaggtcgagccgggttacctggacccttacatctatactcccgctccacaaccggtatcgtacaccggccctggccctcgtcggaacccgtcttcagggtcgaggagcctggcacctagcgatagcgcgagtaatttcgtacccgatgaagccgaggaggcgagattcgagctggtcggtccggccgggctgggaaggcaaaagagcacctcaaggggtgtacaagaggggcagatctcttcctttcccgagcattatatggaccaagggatgatgcctagagtggggccgagaaattcgccaggtccatacccgttcggagcgcaagctggtcggccggtctcctccgccgcattgtcatatgtggacgaggagggcggatatcatcgatctgatcggcagagacctggttcaaattcgggcagaacattcaggtcaggccagaatcaggagggcgaagaaggggaaagtctggtcgacggagcggttcacccagccggatcaccctttgccgagagtgagtatactcgtcgagcctttctgtgtagcaagagtattgaccgagtcgtggagtctagctcactggcacaagcaggatcaaaatttgtcgtcgtacccaccttctgtcgattctatgggtggactgacggatccggcgttgcccaagtggcgcgagcgactactcggaatcgggcagggcagatatccgatcgaacaacagatcgagaacaaaaaaagaggactgggcaggcaaagatggcccttcgcatgctggatcttgaccttgggtaagagatatccgatcttgtctaaggggaagaagggttctgacgagattctaccagcaatgtgcagcgtgatggtttgggaactcatcagccagaatcaagcccaagggacccccatcgcgatcaaaccgaatttcaattacatggtcagacgatttggcagtgatctgcttccctgctcactgactcacagtatgtcatcatcggcaggtcggacccagttcgggtgtattgatcagggatggagtgagatttgtcccttgtatcaagagagtaccggatctcgtaagtttgagtatcaaagtacagtttcttttcgctcgggactcaaatttaaagctctactcatatagcccccgtcattccctctggcttgcttgaacgatacgaacaagtaagcgatgatggacccgggcagtgcctataatggttcttatcgaacttggctagtcctcctgaaacagcttgttctctgggcacgatatgcggatttgggggaataggcccagatgagacgcccaatcgcaagtttcatcgcgtcgcgatatttggcttgcgctcacgctgttcccctacacgcacacagaatggttccggttcatcctgccgatatttctgcacgttggaattgtacatcttttgctcaacatgttggctcagcttacaataggtgctcaagtagaaagagaaatgggtaagccgggggcaatatgaaggctgcaaaacggagttctgattaccaagcctgcaggatcgatggccttcgtcatcacctattttgctggcggaatctatggttttatgtaagcttttccgatttcgctctagcttgacagacatttttacacatgtatttttctgctgttctagcttgggagggagtttttcccgcactggcgttccaagtgccggtgcttccggtgccctgtttgcttgtagtgccgtaatggttgtggacttggccttgcattggggatatgaggatcgtccggggttgaaagtaagcatgacgaaagacgatatacctccgccaagctgaagctcaaacgcctaggcattcttcctttttctcgaatttggtgtcggtatcgcgatcggtatgtaactcggttaccgaattcaattgcgccccgaacttacgcagcactcagtcgataggctacatgtgaggaagataacccaagtctgctgggaacgagaggctgaagtatccccctaccagaccgttcgcggtggatggaatggctcacctcggcgtgagtcctacaacgtcatcaaaacggattgactcgagctgatcctgttgtcgcagggctacgccatgggtctgttgtgcggcatgatcttgatgccggctatactgtatgtcaaatttggcgagaaggtcagcctgatgactcgtgagatgactttcggtgttttcggggaccagtccaaccaaaaggaaggccatcatcgtgtgggttttacggggggttgcgcttgtcctggtgattttggggtttgccttgaccatcaagaatttctgtgagtgctatcaagcaagatcccgtagcattcttcggatggatactcaacatgtcactgcagataccgatgatcccaacgccgcctgtacatggtgcaagtatctgtcgtgcatcccaacgaagtcgaatggtcgatgcacgggaacggtaaatggtgtgaatatttgcttctcgtactgtctgggctgaaagaaacgacgtttacagggtctgatcgtgccggagaacaatactggcatgacaccatctcagcggactctagaactgtgatctcacttcaagtttcgtcattcggcctcgaaatgtatcgcggtatctgcgtcggtgtagtcgagcattatacatatacccttgcgacatccctccagagtctacaagcatgacaatagtatcgctactcgctgagaggcatgatatagggttgggtataaaaggggttacatctcgatcaaggctttcggcgcacgcgattgacatcagaatcaaacgacttccattgtctagcatgcccgctcgcggggcatcttccgttcgactttgcgctcaaacattgccagcacccttcgattcgaaagtcccagagttggtgcgcatgtggataggctcgtgatccgggtggtccgggtccgggtgagacccatgcttcttgacgtggaagaaaaaggagagggcgatgtatgccgtagggatggacagcaagctacaagggatcaagcccgggacattagcagccgtgtttaccataagactgtggtcgcgcgttcgactcacatcaacgtgaccgtgatcaagatgataatcacgcccagcatgcaggccgtcccagagcaccttctggccaagctcatccctgtgatgatggtcgcggccatccagaagacgaattcgatgcagttcaagatcgagtacgctttcaagcttccccagcggcggaatctgggcacccgcccggtcaagacttcgtacaagagcacgaccagcgatttggccgactaagcgcgtcaaggaggtcgagatcggggtcatcaggtctcgttctgaaaaacttccattggcgaaaccgacactcacgacaccgaggatccagctgtctgatcgacttcgaggtccagtcaacgtggccagtcgagcgatcccgaggatgaagaccgagatggtcaagattccctgagcgatcttgatccaattgatgatccgtacttggcgggataccgagatgtttccgggaacgggaaaggtcattgtcacagtcggtcacttttgtatctggactgaactgagtgcagttgattgtgtggagaggatggacagggcttcgctgaagatctttttgtcagtctatcgattcagtcgatgtgtgattacattgttttgcccagcccatatgactttatgtgccttctgccttcctatatatcctctcccggactccactgctgtgccgtctacctgacgggtcttgagtatggacgatcacgtttgtccgaacctcctgtaaatcgcccaactttcgagatatgtccagcggtgaccgacccatcgtcccgacggaaccgtgtctcttccggtggaacgcggttctttctcttccgcgttcagctcgagcgcggggctcccccagcctcgttgtaatctcctctatcacgcacggccaccggaacatattctgattgaaatggcagagatcgacgttgtcatatcaccctgagtgtcacactcgtatgttccgcctgaaatgcgcatggacggggcccggggatcgacctcaacgatcgaaaagcgtgagccttgcatccgagtccatggaaccagtcgcaactttggattgcaaagtctgtcatgcaggacattagcaatcatcaactagcaattctatcatgtatcatcccatatactcacgaacttatcccccgacatcatcgcctcgataccgcttcgatacgatccgtttccagccaagactgcatccagaacacccattccgacatcgacggatctgatacgtcgacgtcggattccacgctagttgaccgcgatctgattccgttatctcgtactcgcggcgctcactcattacccctatctagcagcggggcagccagttagcccgttatctctcgggtcaagtgttcccacactaccactacactgggattcatcggctgaccatcccaactggcttcgactatagaagtagccgggacagattcgttcatttgcagaagtttcaaaagcgaaatgaaccgacgatcgtttcaaaaccgccaattgcgaaagcgatcgacgcacaggcaccatcaagacgatctgtgaaacatgtccgactacgttgtcgactcggaaccaacgccggtagaagcgatgagcaggaaggctaggattcaggagactgctcgatcgaccaaacggaaacttacgacgagggacggatggtttgggaactttgactacaaatggctctgcatgccggtcctcccatgggggaacaaccggaaacaccgtcgcccgtcccccttttacggtctggaagacaatctcccgattcttatccagatcgtcactggtctacagcactctttggccatgctgggaggcttgatcgtccctccaacagtattcgcaaactacctggcactcgatcccgaaaccacaagttacatgatctctgccgctctgatcgcttccgggatcctttccatggttcaaatgtctaggatccatcttttccggggttattacctcgggactggcttgatcaccgtcgtcggcgcttccttcgccacactctctcccgctttcaccttgtttgacaagatgtacgcgaacgggaaatgcccatccaccacaggacccgacgggactatgatcaagggtccttgccccgatgcatatggagccttgattggcacaatgatgctctgttcattgtgggagatgggtctctccttcgtgcccgctcgtcagctcaagaaggtctttccgccagtcattaccgggacggccatcatgtaagcgaaccacgaacatacatcctgcatagtatcgctgcttatatcgttcgtcttcggtagcctgatcggtacatcgctcatcggcaagtcaggtatcctcaactggggtggaggttcgaattgtcacggatcgcccgagggctttttcgcattgtgtccgaacattgctgcgccacgaccggcatcgtggggttcaccacgtatggcaggactcgggttcgccagttttgtcactatcatcctggttagccatgagtagctcaagcgttcaacatcgtcctctgaactgatccgatatcgttcccaacctcttagaccgaagtattcggcagtcccttcatgcgaaatgccagtatcatcctcggtcttattgtgggctgcatcatcgctggagcgacgggtcatatgagttcggcggcgatcgacacttcgccggccatcactttcctctgggttcacactttcaaactgtcgctatttgcgccagctatcatacctggaatctgtgtctttacagtgctcgcggtcgaagctgctggtgacataacagcaagtgcggaagcatctaggcaggaaaccactggtgtcgtcttcgatagccggatccaaggaggggtagctgcagacggactagcaggattgactgcggggttgatgacgtgcagtccagtctcaatcttcgcccaaaactccggagtcatcgtcctcaccaaatgtgccaaccgaagcgctggttatacctgtgctacctttctcatcctctttgggatgattgggaaactcgccggcgtcttcttgtcgatcccgaataggtaggcgcgccaaatcgaatgataccttttcgtcgctgatatccattctttacctttggacagtgtgcttggaggtgccacgacattcttgttcgctcaggtgagtcaggcccccaaccggtcgccgtacaaagactgagttgggtaactttcgataccaggtcgtcgtctccgggatcaaggtcttgtccggattgcaatggaccaggaaggagcgtttcaccctggccgtctcactggcagtagggatgggcaatattttggtgtccgatttcttgacgcatctctttgatggggtcaagaccgattcagagggccttcaaggtttcttggatagtatcgaggttatcatctcgacaccctgtaagtgcatgcgcgattgatcatcgcgcgtcccgagctgatcgcaagcctcggaacccagacctatgcgctttcttggtgggcgtgatcatgtggagcatcttgccagaggaagacgaccctggtatgaaccgaaagactgagatagtccagacgtcactcgagcttggtaccgtcagtcccggaatcgactcgtctgttccctacaaaggcagttccgacgatatcgagattgccgatgtcaaaggcaataccacgatgacgaggatacagacagctacatgacaacaatgtgcagaattgtgaaattggctactgtacatgtctagtgtacggtaatataaagatgacagtgttcaaacggtccccgaaacagaagtctctgcgtggtccccccgagggatctattttcctaagtacttagtgaagtttacctttagcattgatcccgtaattacgcggcgcctaataatcgtcgcaggagcctgtgacaatattggcataagatcactgcctccacagatcccgttcaacaaagacttaccgggtctgagcgcacaccagtgcggctgcagcggtgtcgcgtggattcccttggccacgaggcgataacgcaagtcctggaatcgatgcaatgctttggaggcatctttccgtccagccgagtcgaggtcagcttcgttactcaacaactctcaaaccgtatcggctcttacctaaaggaaatccgttagggcggtcaccagaccaaaagacctcggctatggcggctgcgcgaggccagatcttgctgtccacattgtcttcgtccgtcgtctcggtccagagcacggtctgtccaccaagaaccaagtggcgatgtttgggcttgatccctttgtagggatcaaagctgatgcccaatttgatctgagcaaagcccactctaaatcctctgagcgcgacttacttgtatattttataccatgtattaaacggttgggcgtgccagctcgactctttcctcccgggtagaggtataatgtttccgccgcccccaagatctaggtacaagtggtgagcgggcacaaggacgataggatagccgagggacgctatcttggaagcatctttgctgtcttgccagatcaatacgaccgctttgtcggtcagagactccactcgatgtccttgtacctgatgaagcgatggacttatcgctaatggacagtaaagcgatgttggtcgaattaccctcaccatttcctgccatacaacagggaccttcggcagtagcgttccccacgcggaacccataaaagcgttcagcgcctgcttgagcttccagccttttcttttcaaggtggcctgggaagtttcgtcgtctttctgcggtgttatactaagttagatcttgaatctgtctatcgacagccggtcaagaatttacgtagatgttctcgttgatctcgtctccacccgtaccgaaatacgaacccggcagacattctttgagctttcccagcacatcggtcatcatttgtgtagctttgtcctccatgaatcgcaattgtccggcaggaggctgagctgcgtaacgtttccaaggctctctggcatatcccaccaacatatcaggtctagcgtggtgtatgctggcagtgtgacctggcatatcgatctcaacaacaacgtcgatgcctctctataggattcgaaagattgtaagcagtcgatactcgcttttgctgaggacgatgcgaaaacccaaagtcactgacttctgcggcgtaccgcgtgatctcggttacatcgtgctcgttgtagatctcctctgcagagtaagctcccttatcggctagatctcggagaccaggcagggagagaggccacgattgactatccgtcatatgccctacaattgaaatcacatgagcatcaaaaaacgcgacatactcatacaatgctcacagtgaaacacgttgagcttgacgagcgccatagcgttcagagtctgggaagtcaagatgatcaatcgtatattgccctatacagccgattcaagcctcgcttacacggagtatggtcttcttactgaaataatgtcgagacgtatccagcatgaaacctctccatggaaacgccggagaatcttggatttgatagggtgcggcggttgtgaacgccgtgatgcgctgcccgctttggaagacttcttgggaacctttcgccaagatatcgacatcgccttgttcatttttcgactgcacttttatctgcagatcagatttgaaacatttcattgtggcagcagtgtactgaccggaacgccgtagaaaagctgctcaaacgtagccaggccgcgaaaagctcccaggctgctctgagccttcagcgtcgctctagtgccatccgcaggaatgtccaattcgtaagcttccctccttgcccccgcctctttgtatacctcggatgcgatggtaccgtaatcagaacctcgtaagatgatctcaagagtagtgagcaccgggggatcgttgcttgtaagatattccttgccgcggtctggagacaggtaataatgattgctcttggtcacgtagtccaccatcctttccgctgcagccttcaggtcttcagggatggtatcatcagcagtaaagatgatatccaagctttctgttatcgccaagaagctatgtccttcggtcatggaagagggagctggaaagaggagagccattgcgagacgattgcagacaagcacgaccactagcggtaagcagggcagcatgttcgcctattcattgacgaagcaaggccagccagccatatgcgatagactactgtaatatatataatatgttatggtacagctctgtacgatcaagaaatacattgccttcgaaagcaagaccacggcaatatatgatgtgtccatcatcagagtagcctgtcccatcgacagctgacctccttcggagatgaccgacatgacgaagatctcgaccaaggactttctccatgaatcccagcaaaacgacataattcatcatgtttcgtagcctttttgagggctgtgtatcacaaaaggagatactactctattgtacaaggaatgtcgtgaaatgcgaccgagctgaaatcgctagcggtgatcgatgcccaaaacccaagacatgctccaaagaatcaggtaccaaaagtctgtcgacctggcccttaggacgagaatcgctgtaccaaggcagccctctcttccgaagacaagctctccatgatcctggcgaatccggcaagagtgccatctcggtccgagtcggcaaactcgacgatcttgtccgagatgtactggctcttgagctcagatgcgtactgggagacaatgtcggtgtgcgattcgatccactgagcgacggccgtgtccgaggtggcatcggcatcgacgagggaagccaacacgtcgaccctctcggtgtatgacatgttggggtgagcaacaccgagcttgttgatcatgtgcgactcgttcaacttccttctcaacctccagtagaagtgtcgacgagcctcaggccaatcagcggtggtggcacatcctttggcctccattcggccggctcggtcgtgtagatccgagtacaagagggcgatctgctggtaagtaggccacaagtgctgctcccgagccagaaggctttccttggcggaagactgttcctcggccgacttggtcttgtcttccgaagcagccttcaaggcagcgtactcctcgtccaacctagccatcgtggccaagaccttgtccttcctgtacttgatctcgacgataccctcgggctccaagacacctcctcgggcgtccttgtcggcatacatttccatgtgatcggggttgatcgaggggtccaacacgacccaagctccccctcgcagttctccgttgggcacgatgtagacaaagacgggttgcttgtatgcactgagaccgtcgacgatcttggaaccttgcttcaagatctcgtcatacatgtcttgttgaccacccgagaatcctcgccagttggcaaagatcatcaaggggagaccttctcgattcatgtcgaagatcgcctgcgcggtcttgtaggccgagttagggtaccagacctgaccggcttccatcaacctctgttccaccgaagccgggttggccggatcagcgggcacgatcctctcgatagtcctggtctccacggcaatacatcccataggaatgccacccaatcgagcgcgaccgacaacgacagtctgagcccatccgcccaaagtctcctggaaggatcccttgtcgaagaatccagagagccactgctcgccagcatccgtttcctccatcttaccctcaatgaaccatcggggatcgtaaggtcccttcggagggcagtaggtgatttgtcgatcccaggtgtcgcctgaggggaagatgggaatggccttgcccttgcggtctggcacgtacgagagccactgcatgatctgaagagcaccgtcaaggtcactgtcggcggtaagatgcgagacaccattcttgtacatgatctgaggtcgcagttgacaagttagcgttcacgaatcgtggtcggttcagcccggtctttccaacttacctgagtgccaccaagttgcaagttggacgtgtacacttctcgaccaagtaccttgttcaaggcgggagctccagtcaggatgatgggctgtccttcgacctggacagttcggtgtcctaaccgcaacaggtaggctccgataccaacggaacgagccgagaccaacgagatggtgaagatgtcgtcgtacgctcgcgaagtagcaccggcaatcaaaccggatcccttcaagcactcgactccgagaccgttcttcaaaccgatgatggcggtgatctggtgtcgcctctgaccatcgacctcgatctcgttggtcacgacgctaccagctgcatggattgtaacgagggcgtcagcgggtcgacgtagaactcaagcagtcattatggctttagactcacctccgttgtccttgagcttggccatgttctcgggagtaaggtagaggtacttgatacccttctcggggcgcgaggcgtcgttgaacgcgcagctgaacaagctgatgatctcttcagccaagccgattcgagctccagagttagcggacaagtaaatcctgggcaaacccaagctttgggcaaattcggtgaccttgtagaagaaatcgtcctcggacggtccgaaggatccgatttggaaagtgatgtcgttggcgactacgacgactcgtcgacctttggggtattcgggggtcttgacagtaaagacccaaccgaccataccgcagctgttcatgccgggagggcgaggaacctcttggagctcctggttctcgtccaagaccagctcgtgggcgaccaacatttcggaaggctccttgaggccagggtagaactcggcggccttttcccacacccttcggatggcctgtcggaacaggtcagggaaatcgtaaacgtaggtcgttcctacgacatgcgcctggtatcgcttgggctgcaacgagttcttggtggtgtaagggaagttgacacgctgcaagtggaactgaccctgaggtccgatcgacttgagcatggcagggcccttgtcggtagcgacctcctggtaagcctcgtatttgacgacgaaaccgctgacgttttcaatgaacgatcgaatgggagtctgaataccgtcttcgtcctcgatgacgatacggatctcggcctgggtcactcgcaatcgccacaatcgcttgccgtgacgctcgatgaatccggcgagggcttcttgtacatcgtcaaacgagacgggcagggtgtgcacgcagttgaccatgatgtggttgcagtcggcttgacggtgctgtccgctgtggatctcgagagtgtccaagatcgagttgacgagtcgatcggtctcggagatcaggtactcttgcaccttcatgctacccctgagacgaccaggtcgtagcaaggctcgaacgaagaatcgaatgtccgaggtgttttcacgaccgacagcctggtagacgtggatctgcctgttggaagagtcctgaggagtgatggtaaagttggacaatcgacccaactcgagctgataagcgagggcaggttcgatgttcctgatcgcttgctcttcgcgccaaacattgtcagactcgctaggtcggagggtgtaataccaagggtactggttttgcctgcagatgaggagggtgattcgtcgaacacccttggcggtgatcttcgaggcattctcattgaccagcttggcaaatcgctccgagacctcttggtcgttaacagcgtctccgtaggctcggagagcgatgttgagaacgtggggaaccttggcatccttcccgtgcttgtcagtgaattcggcgtaattgaaggcggggtacagagccaacagcttggaaagacccttttcgatgccgctaaagtcgttgtacgaggtcatcaaaccgaatcgagtgggctcaatctggtttcggttgatggtgtagctgagatcgctcatactaccgattcgcgagacgtcgcgcgaagagtcgacacgaggggtcatgggctcgccagacggggtgtgtccaagcttgaatcgccaggtaacgacgtgggggtcgccaccgctgaccgaatcacccgcctcgtagtcgagatgcatcacgttgtagacacggtaggcacgtcggacgtacacctcgagggcggcaagagcgacccaagcgtcgtcgtggtcaaagaagttgtgcaacacgtcgtagacggtgaatcgcgagtcggtaagctcctgcaggacgtcggtagacggcatcctctgagcgagaccgctctctccgtactggtgagtggtgatggacgacttcaggatctgaagcatctgaacggatcgctcctcgaaagtggggaggctggccaagaccaagacttctcgagcggcgagggcgaccttggtggtgggcctgctctcgagggcggccagcctcctgagagcagggttgatcctcttgtcgttcagagcggcaaggcccttttgcatgttggccttgatgatatccaagatggcaaagaccaacttgttcttgagagcgaccttgctgtgcgacaagatcaacttggcgacggcgtccgtgtccttgttgtcctccctgagcttgagcacggcttgctcctcggtcttgccctgactgaaaggttcttcgatggcggcataggcgttgaggagttcggcccagacttgccactcgtgcgacttgaggccgccctcaaaggtatcgacgagagcttgcaaggggtagacggaagccctggcagcggtcctatccttgggcgcgacactgtcctccatgaaggcttcaatggcccttctgagcttcttggtagggaactcttgctggagattcttggcagaggtgatgatctcccggacctcttcctcgagcttggcgggcatacgtccgctcaaggtagacaagacgtctgaaacgttcgagtagggcaaaatcgggtcttggagggtcgattcgacgatgcgcaaggcggactggaccgaggcgctgttgtcgtacccggccaagttgtcgtagaggatctcgagctgttcgcgcaacctctggtgaggcttggaaccgtatcgtccgtgctgcaactcgaacgtgggcaagagtccctcgaacggcttggcaaacttgaccttggtagggtcatccagggtgagaattcccaggagttctcccgaagaaatggttccaccaggttgcttcatgaactgggcgataccgctctcgctagcggtgacgggcaggatcatcttcatgacctcgatctcagcgtaagcctcaccggcgtcgacgtgatcgccggattcgatcatgtatcggacgagcttcccgggactgggacttcggagctgggtggggtcctgttcgtcctcgatcatgcaggtcttggaatcgaccgagacgacaaaggcgccgacctcttctcggaagtagacggtgtgagaagcaccagcgagggtgatcaaaagacctccgtcgctcaagctcctagatccgacaaagatcctccctccgttcaggtagagggtgaacgagttgggcgaggccttggccatggcaaacgagtatcgagtgttgtcgtagatgaactcggtcttgaagaatgtctggagcgtgtcctttgacgggacctgacccttttcgaggatggccttgtagttggccatcgaagcctcgtaggcgacatgagccttgacgacggcaccggcgatgacggcgagggttgtatcgggcctttccgaggtcattccctcggcgatcaatccgtcgagccattgcgtggtcaacgtgttgttttcaaactcgggcttttccagcaacttgatgaggtactcgaccgtggtcctgaattcacctcggatgctcaactctttaagtgcgacgaccatcgactttcgcgcctcgctacgttcttgaccataggcaaagatgtgaccgaattgcgaatcggcgtactcgtgaagacctccggccgacgagacggaaaagtaaccccagacgttcgagttggacctgaaattgagctcggtcaggtttcccgacgagggcttgaatccggcgtcggggttttctcccgtgatacgacatgcgacgacgtgacccttgggcttgggctttcgctgcgtgttggccgaatcggggttctcgccatcaaagtcgatctcggagattccatgggggtcgagaccgtacagggtcctgatatccctgatcctgtgcaaggggatacccatggcgatctgaagctggacgctgggaatgttacacccgctgaccatctcggtggtaggatgctcgacttggagacgagggttcaattccaaaaagtagaacgagtcgtccgagtgactgtagaggtactcgacggtaccggcactgacgtaaccgaccaacttggccaacctgacggctgccttttccatctcttcaaacttttccggtcgggcgatggtcacaggagcttcttcgatgatcttttggtgtcgacgctggacggaacaatcacgcccaaagagcgagatggcgtttccgtattgatcggctatcagctggacctccaagtgacgagcggatcctgcgagcttcatgatgaagatgggcgaacctgcgagcacgcaacgcaagcaaggcggtcgggtaccagaatcagcctcttgatcacttcccacaacccacaccccacacagtcagccgcgactcaccaggaacttcgctaaagacggcctggaaagcgaccttgaacttttccggcgcgtcgaccattcggataccctttccaccaccaccctcactggccttgatcatgacgggccaaccgatctgttcggccttttcgagtccttgttcccacgaggtcacacaggcattggcgtacgccgcatcggggacggtgacgtacccttgctcggacatgaccgtgtccgagatcccggtacccgaccagggcatacatgggacttgagcgtgctgagcgacgatggtcgacgagatcttgtcaccgagggaacgcatggcggatccgggaggtccgataaagatgatcttggacttggccaacgtctcgggaagacgagggttctctgaagcgtgacccctgcaatcgccaaacgaaacggactcgtcagtctcttctcttcccccccgccgagaggaaagcctattatcgagctgggcttggagaccctgctgatgtcgcctttgccgactcaccaaccggcccaaacggcgtgcacacccgccctctcggcgacatctacgatgaaatccacattggcgtaattgttattgttgcttccaccgggcacctcgacgtatcgatcggccatcctgatgtactcggcgttgatccgcagatcctccggagtggccatgacggtaaactcgacggcgcgttcgtccccaaacgtctcgtacgaccatttcctgatcgaacggatctccttgacagcggcgataccattgttggcgatcaggacctgcgaagtcgagacaagttgaagaggagagagaggggggaagggtcgtcaggtcagcacgcgggggagagtctcgcattgcgcaatgaaaaaaggtcttggaaggtcgaagattgacgcaccttggtgatgacggtatgaccgttgtgaaccttgacccaatccgagaccttgccagcaggggcattctcaatagcgttcccacctagaacacgttccccgcgaatcacgtacagtcggcgtatatagtcagtgctcgttctctctgatcgacatcacagcctgcaccgtctcgattgacagagctgggatgatccgactcaccgataaagtgtgctactcgaccatgatcataacggtccggaccttgaccggtcgacccgtttacagcggccatctcgactttcgtttcgattccgcttgcgatctctttccgtatatgcgcctcgtctgggattcaagcccgtttcaatgtcttggttgctcgtcgttgattgacgaaaggccaaagactaggactgtcgtctgctctccgttcctcttgggcggatgcagtaccccgaaagttcgaggttagtatatgatgggggtggaggggtcgtaaaaggaggacgtgcgagatgatccccgatgtgacgagtgaacttttgagaggggaggttcgggtataaggtctctcccgttgcgatactgtcaggtagatcacggagacgggaggaaagaagacgatttgcgatagaagacgaattcctggtttgtctaacttgagatgaatatggtcggaatggtagtgcatagagcttggggaaccgatcgaccctacctcgctcgctcgctcgctcgtccgtgtccccagccaaatcgtctctcctccccccggccgtctctttccccaagaatggaattccttctcacctgtccagggcttgcacgagctgcaaagaaaataaacgcaacgccatacatgatgagcgatgaaactcaaatcgatgatgatgatgatgatgatgacgatgatgatgacgatgatcatatagccgcgctcatcaagaccagggcggaacctctcccatgcgcgaccaactcacatgcgattccaagacctcgatcccgagtttcaacccgtgtgacgtacccggtctgagtgggaaaggctccaacacgaaattctggacgaaatctaccgtcctcgatcggaagcccatctttcggatcgaatcggatcgatggagggatgcgcggtggggtcgagtgagacgtcgtcgagtcgatcagctctagagaagaaccagagagagagggggactcacggcgacgaggtaatcctgccctcccttgatatcgagcacgttacgcttcatcatcgagttgctcgtcttgatctgagcgtactttggttcggtagggtgatccacgacgttcttgacgatcttcaacaaggtctatcacggggccgaatatcgcccgagggtaatggtgattcagcacgtcgaaagggggacgggtcggaaagaacctgcgagggagctcacctcgatacacgtcgcagccgaagtgtaattattggatcccatgatatccctcgcggcgatcctgccgaattcgagcttgcgtttccgatcctcttcgggtgacggaggggtccatgcgcccggtacgctcggggtggtggactcttggttcacgggtccgcccttggacctggcttcgactgctgccaggatggcggtccttcggtcggtagcgttcttggcgggtgaatcaggcatttgtggatgtgtcgagggagagtactgggatggcatgggatagttgtatcgattgagcagaagtcgacgtgatagcatcatcttctgttctcttcaatttcggtcgtctccgtcgatcgatcgtcatattcacttgctcgcgacaaaccaaacaaacaccttggccgccagggtgatggggtatattcattattgtcgtacgcaacagctacctgacatccataaactcgatacaacgtagcgtattggtgcacatcattctcatctatcctggtagtcatgttttgatacaggctcgagacgacgtcgttacccaagtcgatgaatactctaccaacatgattaattatcctgattttgacaattagaagcgcaaacttttgcgcttaacaatgagatctcgaggcaagtagcaagtggtagatgtagtagattaatcattcaactcgatacaccctcgtccaacaattcacatcgtcccaactatacctagcccatatacagtagtgatagtagactgaaagtagagtggctgtagccagtctggatcacccttcaagatgcctcgagtcggtaagcaccagacccctgtgcacctcaatccgcgcccagcttgtctgacgatctgatccgacctcttttcgaatcgcacagtcaaaggctccatgagcttcaagccggctttcaaggccaagccgaagattaacaacgcgtcgaattctaaatcacaggaacccgccgcttctacgtccaatggtccaggtccatctcaagcggaatcgaccgagacgcctcgaggcccggcaggccgagggtcgcctgaaggggataccatccatgccgcccaacctacgaccgcacgacagcccagactagccaccccgccttcttccctcttgacacccccttcgacgcaaattgaagaaccccgcacgttcgcccctccgcccggacgtgtccccgtcgagtttgatcgaacggctctcccgcccacacctggacccactcaacctcgatctagttctcgaccgcagccgcgacctcgaacccaaccacagccgctcgcttcctcatcttcctcttccctttctcgaacgccccgcgtgccgacccccggcgcttcttcctcatcgagaaacgcccgacaagcctctgagcagcaaggagaccaggatcacgtcgtccccctctcggtgaacatcacggccaatgaattctcacaccggatgacggacgatcaactcctccccacgcccgggttcgtgcttcccaacgcgaaagggctcgggggtggtccgaaggccggtccgccgaggacgacgaggcagagggatcgggatcgggatgctcgtaggaccgagaacggcacgggtgggaaaagcggaggcggaggcagtgaacaagaggaggtggattcggatgatacggatgcgagtggtgatgcttatcaacccgaaggatcgaccatggggatcaagaagaagaggacggggagaaaggagaagaatacacgggccggcaccggccggacgaggtcgaaaaagacgaccgaggaggcgtctgaccaggtacagcccggttctggatctggggacgaggtcgaggtgacggtcgcagctggcaccaagaggaaacggacgaccaagaagacgcaacccatcgtcatcgaccccgagctggtcgacccggctgatccagacgggcctagcggagggtccgaggacgacgtcgacgaggacgaggcggacggtcagaaagggtccaagaagggcaagaacggtcggaataaggcgaaacgacttcgagtctccatccgggacgatctcgacgacgaactcatcgcgacgcttcagccgggtcaagcgatcggagagctcgtcgacgaggatacgatgaccatggctgatctcgccgctggacccggtcaggggcggatctcgggcaaggcgatcaagttgcagcagagcaaggaagagattcagcgacgcaaggaagaggaacaggagaggcggatcaggttcagggtggatagggagaccaggatgcgaggggtcggagggcaggccgcgagacaggccgtccaggccgaagaggaagccaaaggggtcgagagcgagactgagcaggacgatgtggacgaggatgatgagatgaacgaaaaagaggatggtcatgatgacgacggcgacgacgatgacgagctgcgcgaggtcgacggggacgacgttaacggcggagtaggcgcagatgacgaggaagatgacgatcaagagtttgtccacaacacccacgctcccaacctgactctggacgaacacggtgcatttgtcgtcaacaatatcatcaatcggcaggagatgctggacgagtcgatgaacaatggggccgtctttgaagacaatgacgatctcaagtttaccaactcgatgagtcattcgaaacgggcgagcacgatcaggtggacgaaagcgatgaaggacaagttggtcaccgtgagtcttttgacgagaagccgaacggggcctgcccaagctgacgcgtttggatggtcccctctttccgaaaccgcagctgttgagacagcacggtcaggtgtatgagacgatcgccaagatcatggcgctctattaccccatcatcgagcggacccatatagcaaatcatatgaggacgtggaacttgaaggacccggaactcgtgacgtgggcgctggccagggagaacaagctcgatatcggtcagtcccgacgatccccaagtctacccgttgcaaaaagctgattcctgtcgactgatcgactacaccctctcgaccacgaccctgatcctgattgacagatatgaacgaactcaagcgagtctacccgggtatcgatttcgacgcgcccttgcccgacattaccatgtactttgaccccaacatcgatccgagcgagatccgggcgatgaaacggagtcgaccgtcgaccaaggcgatgaccgagcaggaaaagaagaagcaggcgaggaaagccgcgttgagcaagaagaagcaggaaaagatgagacaggcggccatgatgggcaccgtggaagagggagacgaggtcggggatgacgagattgcggcgatgaggcgacagccggggttgcccctctgatgaggaagggaagagttttttgtgcgccgaagggagtcggtcggggcctcgagatgtgcgtgccgtggggtcacctctacctggacaaaagtgtttaatctagctgtcgcccggtcaagaagcgagtcgtacaaatcaaatagttgtatcagcgttattcgcctggagcccgccttcatgggccttctcgagcggatttttggacctgatcagattccagtcatcgttcacaccgaccaaccgacgggtcgcgtctgtgcgcaggcaggccatcttgttccgcatcggagcggatcgccgagttgaccgaccgattgattgacgaggtcccgggcgtttccgtactcctcgcccatacggcgtctcgggatctggaccaggttgagctagtctgcgattcaaaaggagttgtgattcgaatcgggtgaacaaaagagggaatcccgtgggggttgtttctgtttttttttctttcgcgtttcaggtttctcaagcgacgcgcgcgcgagattgaaagagaacaaaaagcaaaagatgacgtttggacatcgaaccacatctaatcctctctcttgttcgacgatttatcaactgcatattcgctcccatatctcgttggaacaaatgactcgaacaaaagacatgccattgaactcggcatgaaacaacggaacaagaaccatatcgggcgtcgtcggtggcggcaggtcagcgtcggcctgggcttgggcttgggcagagggatggggtatgtagtctggacacactgcgaattcgccattcgtcacaaaagtctttacatccatctccattcatgtttcccaccttgcaaccattttatctatcgaagcaacaggaacataccgcctaccttgtactgtcgcaaacatagcggacgatttcagatcgaattgcattatcgaaacagacacaactgttttgctcctcctgttcaccggcgaaaaccacccggatgcccttctcagaccttcaagacctgagtcctcgctcaacgtcttcccctcaaccttccgtttacccgaaaaagatgttccgacaccccacccctctcgctcccgggtcacggaccacctcgttcacttcggaatcgcaagaagccctgaaaccgtacctctccctcaaagctcgtctatcgcatacgatcctctctctccccctcctctccctcctcctggctctggcttcgttcttgtcggccaacaactcggcaagggctcgagcggaggatgccaaggagcagatcatggcgacgtgtaaaggcgtcgaacaaggggtcaggttcatcaccgacggacagttggcgagggtcatggcggaaaagattaacgagcagacggttgatgctatcaaggccaccttgagaggcttacacagggtcctggacatgaggtacgttctgaaacacgctcgacctggttctaggtgctaatagagaccaagctcgcccgccaccggtctcggttcacagcttgacaatcatcgaaaaggtcatcgggttcatgatcgacatgtaccgctcaatcttgatgtgcacgatcgagtttgtcgtcagaggatccctggccatcatgatcggtgcggtagagacggcaagtcccgcgccccgagcgatttcctggccgaggcaagcatcgaactaatccaggattgttgcgcggatttgcatagatatcggacgggatcgccaccaccctgaacgggatccggagcaagatccaagctgatatcaattcggcaaacaacgtcatcgccaccgccatcaaggcgatcaacagcgtcacctcggtcgtcaacgtcaacctctccgtaccccaattcgacatcccctcgctcgattccctcgccaacgtttccatcccgacgacgttcgaggacgatctcagacgtctcaactcgagcttgcccacgctggaagagttcaggaacatattggaggacctgatcgccgtgcctttcgagagaatgaagggggagatgaacgaatcgtttgcgcagatgatcgacaagatcacggtcaacgccctgcctaccctcaatgatggatcaaactcgacgagtacctcgctcgtccctcgcgcacagcaagaagcgtacgacctgtgtggacagatggatacttcgttcttggacgacatcgcttcctctctctcccgtctggcaaagatcgccacggggctgctcgtcctcgcctttctgcttctctggctcgcgctcatattctgggaatggtacacctggaagcaggtgcacgagcaagcgcaagaagtggaggaattggtcgagagggagatcaacgaaggtagacgggttgacgggctgaggctggtccagatggtcgaacatcccatcgtggaaaagtatggaggtcgcgtcgttgggctgttgacgcaaaggagtaagacgaacagcaacttgaggtggttctgtaagtcgaccggtgagattgtcgtgtgacacgaataggccactgatgaactacccgcttgatagtggcctacatcactcatcctccggctctcctcctcctcggtttcggaatccttacctttctcacgatgcagattcaactctctgcggttcacgcgcttagggatcgttcgtctgcggaagccaattcagccattgcagtccagtcccaatcgctcggtgttgcgatcacccaggccaagctgcaacagagcggagagtatgcgaccaacatgaacctcgtcattcaaggctggcaacaggatatcgatacgacgattttcggaccttggctcaacacgacaacggtggctctgaatacgaccctcgtcgaattctatgacaaggtggaagatggtgagtagtatttcccactggtcgtcgcacatggcgttgctgagtatcaaaggtcacgcagtattgaacgcaacgtttggacggaccatcttcgctacctcggtcaacaactttgtctactgcatactagggtcaaaaattgacaacatggcaaatgcattgacttggatcaaggagaatgccaaggtgactctaccgacgttcgattcaaacattctgatgctatccaataccacgatggactctgtcgctgaccccatcgcaaaggctgctgcgggaagcggttccggtgacgatggcgacaactcgggagtcattggaagactctttgatcgttacgaaaacgagttgagaaagcagcgcaacatcgctgcggtctttatcggactctacggtatcgtcttgctcaccggtcttgcggtctttgtttggtatacctggctgaaacgcccctttgcgcgatcgcgtatgcaaaggcggggtcagacctttgaggagaagaaggtacctctcaatgcgattcaatcgagcgaggccgagaaggcggtgcacctgggcccagcaatcgccgctccgccaggtccgtttctatatactggacaaggccacaacccgagtcagcagtctttcttcgacgactcggacgcccgaagcgtgtatgccaacagcacgcaccagccacatcacggacgaccgggacaagccatagcggccaggatgagagccttgtcacctgttcgtcgcagtcctatccgtgacgactatgacgaacccatgttacccccgcctacgaaaagacaggaaccccaacccttgacttcatggcaggaacgcttggggaatacattcggaggattcttgacccttcctgccctgacttccaaactctctcgaaaggtgtcgcagaagagctcaaagaccgaggcgtcttgggccggcgcatcatccagcccagggcctaccaaaatgtttcagataagtggaccaagcgcgctcgcaggatacggcgctactcaatcgatgacgcaccagcccacaccgagtccgttacagcagaaccctttctcactcggcgacgaggacgaggtcggtacccccatcgcggcgcggtttgcgcaccatcgaaatcaaacggtcgctaccaaagatcttgccgggcgatacgagcgatcgtattgaggtgtatatgatgtggctacaaagatatccgactgttatatgatacaatttatgctgtaatttctcctttaccaggatgccacatgtaggtcgatgaatgatgataaccctttctatgcagtctgcagatgcagacactcgacaaagcccgtcagatcgtctttccgtacttctactatgctcgtatcgaacatgtcgtgtcgagcctgcgcaccagaatccgccgctgcagattgaaaggctagaccgaatcgactgggtgtggggaaggaggggagattagtatttccatcagtccatctgttgcagttctgttgagcagagctcagaccactgactttttcctgacgtcaccgaattctggcgctccactgatgccgacaacaaggaatgtttcgctcgcttcatcgagacaagccagaacgatcgggtgggcgggcgtcttcctcctggcctcagcagctcttgtgaccttgtcccgcgtagcatcgatcaaccaaagggctagtctggtaagaatactagcatgcgagaagaggcggaggtccggcccttcgcgaatggtgacgaagcgaaaggaccggagggtcttcatgctgttcttgtccaatatggaacaaccttgacggataatcgcttgatgaaggcccttcgccagccccagtgaacggctcaacaacttcacgctgtatgcggtcgagtcggtacctgtcaattgctagatcaagacagcatgtacttactcttgcatcgcgtcataagacacccaaaagttcttctcgcatcgcttctgttctacccgcgcatggcgactgagctcgtcattttcgcctgcttccccgtcgcctttatggtctctagacgcaaaggtgttgcttcccgaaatcccgctgactgtccacgctttggtcgcaccaaaccactccccccctcccttgccgccatcttgctcgatttcgactcggatccccgtggcagcctcgagaagggcattcaagccttccacgccgtcggcagcagacagaggcgaacacctgtatccaaacgctcgcgtgaaggacgggtagtgcagctctactagtccatactctggggcgacttcttccagtttatctctcagggtcgccttgaggtccatgtccatgtgtgaatatgcttgacggctctgttgtatcgagaaactgcgggagtatcgattctctttagcctcaaaaagatatggaaaccgcaacaaagcgacgcaccccatcttggccaacaatccgaccagttttttccgccccttttccttccaaatgcccatgcgacccgccacataacctgagtgaaacatagcgtcgtagaggttccagtgacggaagaggacgaagcgcaactcttcactgggcgagatagcgttatcgtcagggtttccgttggctggaagtaggccatttcgtcctggtgaaggcgggttcaatcgcgctacttcgtctaggtacagcgaatgacgctcatcgtatgtatcccgatcgatccgtgatgagatgtactggtgtgtcaatcccaagacggcatacctgagacaatgacccatgctcaacgccttctcttcgaatcgatgcgaaagagtgtcagagagactcaccacaggagatcgttatcgcctcgctccagctcgcttgcgagaatgtagcagcattctgcgacgctcattccgtaagacgttccagcctgatagtaccgttgtacccggtctgcatgtgcgttcctaatcgctcgtggaagacgcttcggctaagggggatttccggatgttcgattagggtccggctcgatttgctagaggcaaacacgctcacccggtctggatcttcatcctcttttcgcttctttttccgtcgaccacggtcgtcgcctgcctcatctccgccctggcgtcttcgcttgccgtttgatccaccactctcttcctcgtcttgttcgtcctcgtcagcgtcttcttcttcttcttcttcttcttctccatcctcctcatcggtgccatcgacgtcggtgtcagattgggagccatccgagtcactgtcagagtctatttcaggttcgtactgtaatgatggtccccgaatggtaagcgaatcggccagatgtcgttgtagggagatgcacgacagacctcgagcgcttcccaacttttcttgacattctccagcttcttctcgtctccatccccccagatccaaatcctacccagaggtctatcctggatctcgccggtatttccgttcgagccgttcccgtttctcatatcgatgacgtgcccgttcctcaagccaactcctaggccgtcattgaccgcacctccaaagatgttttccaggttgtaaggtcgatgggcatcgatcaaatggatatcacacgcatgtgtgccgatcgggaaatatgacgagagtggcaacagagaccccagggaaaggaggataagggtgtgtacctggagacaatatgggcgtatcgttgatcagactctagcacgatcgacaaggtcgcatgtcaactcgcatcagggtttccagggtatcgaccatcttctgaaccgaatatttgatcctttctcgtctcgagctcggtatatcctccaataggtatgagagagtgaggtatatcttcctgcttgaacaagttgaccaagacgtgtgatgccagtagagcgtcctacgatgcaagacgggtcgtcaggaagatacaagacccgatcgacagggactcgcttacgacatcgatggctgccaggatgaccactccgcctgcactgttctgtgggttcgctctgaccttgcggacgatcgaattccatgcgtgcaagtacgtgatggtgcctgcaggaagctccgagctcggaggacagatcacaggcattctgctgggcgtcccttatgtcgtcatggatgagctcagcattcaccaaagatagcgagttataatggcaacgttccagccgatacttgtagtctgggttagcgggtgctgtgattcaataacagagtgtttccaaacttgtctgatcacttggggttctcttgaatcaaacgcgtcgacgcgtatgaacgcggtcgacctcgatcgagagggacgcgacgcgaacaggatgggacatgagatgcatgattgggtgtcgtttcattcttgatcgacgaagagatcgacgtctgaaacatcgccgcctgggcaccttggctccgcccataaatccaaaagtacagacatctactattatgctacaaaagtatcgtgcaagaatttctcgtctatcagagcaggtaggtcccattgcacatcagctccatcgcgaacttgagccgaggataacagggcgccaacttacaatcgtatccagattgtccctgttcgtcctgttgtacagtctgcatagtatgctttaaaaagttcgttacatccaaagacaagtgcgcctgtcgcatatttgtctctgtgatcagccgatcgccgttggcgagattatgaaacgcttccagaagctgatccatcgatgacgagtcttcggtgatttccacctgtcagacactcaggatcagctgacattgcgcatgacgtcgccctctatcatggagatggactcactaatagagagacgaaagcatcatgcgtgacggcaccatattgcgcgcaggtattccggtatattcgttccagttcctcctcctgtgttcatacgaaatgggggaacagtttctggtcagtcgcctttgcagtaccatacttagtcgatggtatgcgtacggtgaaagtcatgccgagcgccgcgagcgccgagttgagctgataataatcgagatgctgatacagcggcaacctgtttcagcatatcgcacatccatgtccagcttagccgcgtgctcacatcgttgggttccatctcgaagcgctgccacacttcttcccattcgcccagctggtcagccgttacatttgtggtacttgcagcccggatttctgtcacgagttggaggggtacaccaagttaaatcaaatccaggtgccgtttatgggcccgacatacgattttcgataaagttctccttctgccggatggtgtcttccaagagatccaactcgaactggaagtctttgacgctcgaggctcctagatcgatttcgtcgatcttggcttcacgacaagccttctccacttcgcctacggcatccaaattggtcttgaggcttgacgcagcggccctgaacctcggcacaatggattgttgtgcctgcgatgacacagagtcaggatctacccatgcgtgataagcacccatggcaggactgcagactcacttccagactgccttgcatatgtgtcaactcatcctgcagagccgtgatacgagcatccagcgatttcgctgccgtccggtattcgtgcttgaggcggtcttttaccctgattgtaagagagattcagaggcattctaactcgtgcagctgatctacggctcactcgagaaggttggcattgatggcctttgatgtcgcagcctcagtggcgaccagttcttgccatattttctccacttcctacgatgcaggaacgctggaatcaacaaaaaacatccgctcatacacaaggtgcattcaattacctccaatctcacgccttcagccgggcgataacctcgaataccagcggtcttgagtctcgtttgtatattgccaaagttggtcgccagatattgtcgatttttggcaaaatcccgcttgacgacgggatacttggcgaaatcgtcaaagtgcttcctggcatcagcataatctcccgtaaacttgatttgttggaattggtcgatttggccaaccatgctgtctatcagctggaagtcgcgtgaaaccaatgtcaacaacagctgcgggcagtccgtcatacatcccgatatctgaccttctgagttccagcttcgtaagctgactgcgatcccctgtcaacgatatctcggtcagtcagatccggctgtattgatcggttgaaaacttactgaagcgccttgagcatttctgcgaactgcgttaccctccgggcagtcgtctcttgtttgtctacgatcgagagacagctttaggccgaccgtattgaaccccatatattcgagcggactgacctaaactgctaaaggcgtggaaaaattctgccacataggtcataactatgatgacgtcttttagacatgaatacctaattcggctgttcgaagtcgactgacctgatcgttcatctggtacgctattgcatatgtccgagacctccaaaagttgctgcattggcacaaggtgaatgagtcatcccgtctagctcagactggacctgttgagcacttactgggattccgagatgtttggctgccacatcaaaggccatcgttgtacaagctaccgcatccgactgaaaaaaccgaggtctcaattcccaaacgtacaagctcgaaagacctgagaccgaaccttgtcgagcgtgttccaatcaagtaggtctggtcgatgacgatgtatcaaagcgcagctaccatacgcttgtcagccatgcaaccctgtaggtacgtcttgtcggtcggaaggtcctgctcacaacgccaatccgctggtaaaactctttccgaaatcgcgcacttccacgccgtcctctgaatacggagggacggacgttttccgctgacaccacaagagaagaccctctcgcgccgaaagcccctcctccctgcttgacgacagggcgtcagacaccgatagaggacatttttgttccaaagttgaggactcacgtgattccatcgatagtgaaacgcaagatcaatgtccatatctgaaagacgttgcgagatgagctgatcggcctgattcgccctttcccttaagctgttcaacttaccagacccaaaatgatcttcagatttccatccacaatatctatacgaccgcgacatcagcttggctctcctttccacttgaaaccaaagacaaaactgaccctcaggacctgatcatatcacaacatgatcggggttcagcctttcccgtctccgcaccgcctctgaaggacgatctcttaaatctcaccgatgttcgtcaacctgatcccccggctccgcacgaaatccaaagcttttttggcattctacagtagcgtggagaatcgatcagctctagagatcaacgaccggacaccgagggggagaggaaagactcgcctcggcccgttgtaccctgaatttaggggtagcgttgtatcgccctgatcatcatgcgcatgcgaaggccggtcagtaccgtgttcgtcctagaagtatctgtccttcaaataggtaccgagggaagtgtcggacattgtttcctagtacagtgaacgacggaaagtctcagctcggtcgttgagggtgtagaagcaactctgacttaccaacagctgatggaacagagatagtaatacacgaccagaagacgtagcgatgaacacggggaagtcaaaggacgccgagtataactggctgacctggataagcttcgtcccgtcgcagatgtcggggatcaaatctcgcatgggagaaagctcctttgcggccagcttggtattgatcctatagaggtttagagacggtgtcgagcgtgagcgacagccaagcgaaatgtattgtcgaggtgtgcttaccatttcgtgaatgttctgcacgatgccaacgagtgccgtgatgggcaattggttgagtgaatggttcgataatccaggtctcttcctggctcaccttccctgaacagatgcccattccacatcatgcccgaaagtcccggggctcatcatcctgcgaggtgctatataccgtttcggcgtatagcaagaggtcgtaaacggagcctgacagtctaattcggtgtggttcgaagagttgaatgagagaggcgtcacgttgatgagccgtggtccaagtcggtatgccctctacacctagtcccatcaagagagaaagcaagatcgcaagatcagatcaaggggctggccgctcgccgcttaagcgagggtgaatgtttactttgtagaatcagcttccgggccccgtgacgtaacagccggacccaattggctccaaatcaatgcaaattcatctcgttagatatgacgtggcaattaatgaccctcagtgaactgccccgatttgcctccggatcgacgctctctcgcgtgggtggatgagtggatggtgtgtcggtagaagttgactcaacgtccagccatctggagagcgggcgcgcctgtcgttctcatgtgtttgccacgatatttcgccggttcaggcaactcccccccccttgccaagtctggatcgaccgagcacgcacctctcaccatctcgtcctagactctttcaactcgcaactcgcttcctagtcttgatcttaccatcatccactctccttttcccaccacatccttagactctcttcttcttcataatctcttcagagcccgcacacgcaaacaggtcttgacgatctctcgcgatacatcccaatccgagctgctggtccagcttgtcgtactctcgctttgatagcaaccaccgtaaattcttaccaccactaccaacttagcgatccggtctgcaatcccccaagatggttcgaggaagatggggccacaaggccgtctttgtgccttccaccaacatggtttacctcgtcggaggagaggtcacggagaggcccgagtttccactagagatcaccaacgaactcttgcagctcaacgtaagcatggttcacatcaacatctaggtctttcgcatcaatcctgaagatcgccttgttaccatacagttgtctcagagcaatccgtctccagagacgctcgtctcctctggccttctacctacggctttccatgctctcacttactctcctgtgtccaatcagctcgtcagctttggagggatgacctcgtcctgctcgaccgactcggtgttgcactccctcgacctcggttcggggaacgattcattgacctggaagtctgagcagagtcctggcttgttgagaaggcgaggcgctggaatgatccgactcgaggcgacgatgggacagaccgaagggaaattgatggtcttcggaggagccgtcgaccaatacgtctgctgtaagtctgaaagggtttcacactctctgggttgcaagctcatcaatcaattccggaaatgtctcgcctcgatagcttcgacccatagttactactctgcctttgacgtcgtcccttaccctctcaccgaggcatctgtccacaacaccgacgccatggccccttcctcccgctctcctatcgccgtgtcggatttcgccatgaccgcgctggcgaacgataccgtcctctttgtcggaggtatcgacgcttccggggacatggtcaagatggacaggttgaccgcctggagtgacgaacaagattggtacactctcagcttgatgggtgagatcccgcaagccaggatcggagcttcgatggtcgcccatccgacgttgaaggatctggtgtgagtacaaggggacggttacaggaaagcacaatctggcagacggctgacgaatccggtttcccccactgggtttggcagtatcttgcatggtggagccgttcaagatggatctaccacctctgcgatcgcttccatctcgctcctcaatctgacgaccttgacctggtcatctccctctcagattcagcccgctcggcaggacgctcgggcctggcaatccgacatcatcactccttcgggagtgctcgtctcggcattcggtctcggcgccggcaacaacccccattcagaagtcaactatctcgacatgagggattccaaccctggaaactggggctggaagcgggtctggacaaacaacatgttggagacggttcctgcttccggatctaccggcaccagcgctggatccgccgccaacgtcaaagttcctgccacatccaacaatatcgcagactctgaagaaaagggggacgacggcagtctcaagaagatcctccctcctaccttgatcatcggcatcgtcttgctcggactcgtcgtctggctcgcccgtcgtcaggtcaagatcgtccgccgccgtcgactcgctcgacactttgagatcgacaacacgcacgacgaagagggcaacagccgcacgtccaacctctttgaccccgtctccaagttcctggtcaagcggggctggacccagtcttccacctttgccggtctcccacgacctttcggcggggtcaggatccccgatggagatgagaccgagactcgttcggctcccggatggcagtctagcttgactggaatgtttggcaagctctccggtcagggacaagcacccaccgacagtgcaggcgagatgcgtcaggtagacggccgaggcgcctcccgtacacagtgggaagagatcgatttcgggctcggaaggatcgatgagcagagaaggagctccgtaggaccttctcgacccaacaccccgggtcgacgatccggtgacacctccctgcaaattccggctcgagaattcaacaagaaccgaagccgcgtcagtttccctcctgataacgagcacattgatcctgaatacctgcccgcccttgtcgtcgtcccgcctacggtcccatctacccccaacgacgaggccaaacaggaagatccctttgcgtcataccctgtactcgcgccttcacccaggatttacgagaccatatctgaacagcccgaggtcgacccccagacccgtgctgattgggatcagctggaacgggaagtcgagactgctcaacccttccgtcgatcgggaaccatttctagcacctattcgactacatctgcgggctccaaggaggtcgagcccctacctcgcttgtcgtttgagcaaaagacgtcgaacgaattttcgcacagcctgagctcgtacggcatcggtctcggacaaccccttactcgtcgagcttctggtagcgacagcatggggaacgtcaacgctggtcgaagcgtctcctcgccctcgccccattcgcctcctcgtgactacaactcggccgctacggttggctactcgcccagctacattcgagatctgattaccggacacgctcaatcgcctgccagaatcccccgttctggcgagctgagcaggtcagccaccatggcagatcgaccgcattcatccgtcagcctattcaacaagtaccaatcgaccgacagcgattcgcacctgtccttgatggattaccgtatggacgccgcgccggtccgagctcagcgtctctctaacccacctcgattccctcccccgacctgtcctcttcctcaagcacccaacgccgcgtccagccgacgagtatccgcgtcggacgcgattggccgatccgataatgccgttggcactctggctcgatccggagatgaagtccgccagcttcgggttgttaacgcaactcctcgcgcggacgaagtcgacgactttggttcaagggcctagagcagcgatgaagctctgaatggcgcccccttcttttgatcttttcgctcggtggctggaacacctgtagactattttcttttcgctctctgtcaaacaatatgaaatatcataatacccatgcctgttttacacccgatcgcagaatgcctcaagctcgcgtcgagcttctccctcgtaactcggctagcaggacatccttgggctcggtacctcttcgcttggccttgaggtagtcggcaaccaaaaacgcaacgtctgacagaagcgagcagtgtcagagaaaggtggccgtccgccataagctgtgtatgacttaccgagagactgctcgtaattcagcctaggatcgcaatgcgacctgtagttgaaggacagatccttgtcttccagctccatcgaacctccgatgcattcggtctacagcgacatgtaaaatgagcgtgggcagaaacgacctcagatgatgataacctacaacactgaagccatcatcgttgacttctccggtcagctcgagatgaacaccgccgaggatcgtgccctgttccttgtgaatgcgcatcgacgtagagatctcttgtatgatgtcgacgaaatgtctagtcttgagcgagggatccgtctctgatgatttggtgctgtaatgtgggagatcagttgaggtcgagcaggacatctctttgggcaccagcatttactttccatgctgcgggccaatatagcgtcagcacgactagtcattgattgccttgaagccgatccgactcaccatcgcgtcacattgccaaacaacaatgtgcttggtagccttgaccgcttcgatatgggtcggcaggaacttttcaatcttgtctgctccgtaccggctgatcaacgtgaccttgccaggaatgttgtccgggttgacgactagagcggtatgcagactaagcgtgtgggatcatgctggtcgtaaggcccattcttaccatcgagcagctgaaccagctcttccggtttcatggtcggtccgatcttgatcccgatggggttctggatacccctaaagtactcgacgtgggcgccgtcgagctgtcttgttcgatctccgatccagataaagtgagaggagaggttgtagaactttcgagccgagccagtgctgtccgaccgcgggttcgccgagccctgccggtttcgggggagcatcgagttcgatctggagagagatccggatgactctggcctgacattggtccgcggacctcgggtcaaagcttcttcgtactccagggacaacccttcgtgactatgccggacaagctaaagtcaatgagacggcccggtccgtattcgtattaaacgctcgactgacctggtgtagaagtcgaccgtctcggtaccaccgcgaccgccacctggagcagacccaccggtcgcagatcgcataaagtcgagactatccatcaagctatcaatgacctcttcgaaagccttttgcagttgaggcgaatgtacgtgggagaaggaccagtttcgaggttggtgcaggtctgcgaaccctgacgataacagggctcggatgtagttcaaggtcgatgccgaatgaaagtaggctctggaaactcaatgttccagtgagttgacagggtcattgatgagtaagtaggcgagactcaccccaacaacctctcggggtcagccttcctgtccgtcacatcgaatccgttgacgttatctccccggaaactcatcacctccttcttctccgtcttgccgtcttcggcagggtagtctacgacctcggtaggcttgcttcgcggtttagcgtattgaccggcgatacgtgcgatacggatgactggcagacgggatccatgtaggatgattagtgacattaacaaaatcctggtaacgacgacgttttgatcaggcctcgaacatgccacggcggacgataggcaggaacatacagggacagtttgtgctcgatagggtcctgacgagagcgtgaagagggttagggtggggaccccttttgagatgtcatccaggctgatcaagattcttacttgagagcatgcttcaaagagctcggcacaatctccaccttgcagaaggaaagctttgccttgggctacatctgcgagctgagttcgcaggcggtcgatctacgacaaggcagagagagtcaaaatcggtggaccggcgggaggatgacctttgcgatgcgcgactcacctcgttgggagtgaccaggggcggaagttgtctaagcttgttcaagactctatgaaccgagtaccagcatgagtctgagtgcatcgatgagtcgttgatgcggaaccgcatctcacttgtcgaggtgctcgctatcgtcatagatgacatcctgagcgattggcttcttgcgccaagaatcgggagtccactcggtcgaaggcattgtccggtaaggatatctagtgtgtgtaatttaagctgacaaagatcgtgatcagtatatcggccaaggtcgaggtagcaagtagcgaatgaaatcaagactcgagatgatcgaccaacatcgagcgtttggcggaaattccaaaccaaaagccgagcgagcgagcgagtccacgcgccaaggaacgattcatgactcataggacacgaggacatgagggtcgacatctcgatgcatctcgttgacaactctctccaccagtccagtcaatcatgctcaagtcatgcttaattcatatccaatttctagctctgactctcagtggacacagtctactctcgttatacccgtacgagccagcccataaagacggcctggaccatggcgaccacaaagaggaactggaccctcctcgatcgttgcgcgtgcgcgataatgaccacgggttcgttggcaggtgcggccgacggatcgggcaagaggacgtatttcaacgaacgaagctgcagagccatgcatcgtcagcctgatcgttcaggttcgaagggacaattcgatcaggagatcgagcgggactgaccaggaaaaacgcgttggcggcgaacgtgtacgtaaagacagcgaggtagaacatctttcccaggccgaggaatgacgccaggatcgtcacgatgatgctaggatgtcaaggaacaagttgtaaaagtttcagtatgaggcctttgttcatatggaagacaccaacgagcttacccgacgaatttataaccgccatagcccatcagctcgacgccgctggctccgcttcctcgaacatctagcaaataacaccccattcttttccattccgttccacgcctagtcagtacgagacatgccactcaggctttaacgaccagcaaggactgaccggatgcagaggaattcaaagatgaccaccgcaaacgatttactgaggctgattcccagaacttcaggatgtcccgaggcaaaggcggcaagcagggtatacgtgaccagcgccatgactatgtacgcgagggcgaccgacacccgacatcgccccgatcagtcatccgacccctttgagcacgcccccgagttggagatcacggtgactcactgggaatgtagagatcgggtgcgttgatatcctctctgggcggcatccagccttccactccgcctcctccgttcggggcttgaccgtctccagccatgctcctccgggagactttccgggaccacgacttgtgtctccaggggaacagcaccaatcggagtttcttgaggacgtacgagtttgtgaccgagaacgaggtcttgaggagcgggagtggcaggtaacgggagacctgtggatattgaaagaaagcgtacaagtacgagtacggcaaggatcgagatcagctgtacgatcgcaattgtcaagcgcgagtctgtgcagactcgcattcttttccacgtaatcctgtccagctttcccgatcatggtcgccgtggcctcgttcatgcccatgggccactgtccgaatcctcccatcatcgattggaaaccctgtcccggctgagtgggcgctccatgcatccccgggttgtacatcccattagtggccccgacattgttcgcacccgagctgggaccggcgaatcctgccccgtaaggctgttgctgctgctgctgctgatgagtctgggcggtcccgaaactaccaaacgattgagccggggcgggggtgtagtcgttagagatgcctcctacgccggctcctatctgggtaggcattcctcccatcccgaacgagttgctggacgagtatccttgtacgggaggactactgtaccgggtgtaaccctcggagctctgcctaacagcgtcgaaagatgccctcgcttgttcgacagagagacgcgtgggtgggttgtaaggcgaggaaggatccggggtgatgggttccgggggaggttgggagatgtgagagggtctcgggtggaccaaggggggaggagaacgggattgactgtatggcattgacatggcgcggcggctgtctaggttcgtggctgttgcggttgtcgtaatgctttgttgtaggggaatcttacgagtcgatagatcgtcgagtccaacgaggtggggttgatgttcgaggtgtagatgggatgagagttatgcagagtaactatggtacatggtatacatgggtatggatggtcgatcgtggtcgaggttgcgctcgcgcgattccacgtacaaaataccgttgtggggtccatggatgacgtcgagagagggaacaggttcaacacgcaacttgcttcattcagttgtaatacactgggatttgttcattccacttcatctccatcaaaagttgatactacccggactctcaactcggcaatgaattgaggaaatagaaatcaaagtctcctcctgacccggttccacgtcgtcctcacccctcgccgggactttcaagcctgcccccctccttggagttccttccccaccagctgggcacattgacatttcctttgtcagcaagctacacctgctcagtctcttccggctcccccttgataccctgacgaccctctcatgctacctcgcccgtcagaaagcaccgtacgacctagaaacttgcaagaccctcacatttacctagaacaaggcatccccctggacagattcgaccgtacgcatcatcaacgaccggaagatcaattccatcacgacaacaattccgtccacgaacacgattcgagagactgttatcgatcggacgacgaggagatgtacgagaagacgcatatccggcagaggtccgggtacttgtcacccaccctcggcacgttccctttaagcgggaatgcagcggggaacgacgatgccgggacgagacagcgcaagaccgccgctcgggcggatcagtccgtgaacgagactggaccagacggagaaggagctaccgggctaggactagggttggggttgggtctcgattcgagaaaggaaaaggacggacaggtcgtctttgagaaaccgaagcacgagtcgagtcaggtggaatctgcaggattaacaggcaaggataggaaagcgtttgtattacttgtcatgctttgtaagtcgcgctttttgatcggaaagggacgttgaatgttgaattcggaaacgtccatctcgtccgcccggttatagacctgtaagtgatttgctgggattgatccgccgctcattatcaagcaccaactgaacgatatccctataatgatagtctgcagggaattccaataggtctcacgttcgggaccatcccctttctcctcaaaccacacgtttcctactcccagcttgccctcttcagtctgagctcgtggccgtacagcctcaagctgctgtatagcccgatcgtggacgcgtggttctggaatcgattgggaagacgcaagagctggatcgtgcctgtgcaaatcgtactggcggtgaccatgtgggttgtaggaggccgcgtacagggttggatcgatgcggtacgttagaacggagattggtcactgtcggagacgaaggatatactcgactgacgctcggtctcgtcctcactcaaaggaagagatagacgtccactttttgacatttatctttgtcatgttcatctttttcgccgcgacgcaagatatcgccgtggatgggtgggcactgacgctgttgtccgggcccaatctgtcctatgcgtcgacggcgcagacgatcggtctcaccatcggatccactttgagcaatactgtctttctcgcgctcaacagcgtcgagttttccaacacgtggttgcggcgagtacctagcatcgaaccggcgatcacgctcgaggggtacttgaagttctgggccggggtctacctcatttttaccgtctggttgatctttgggaagagggaagaaccgacgagcgatgatgatcccgatctcgacgtccgcaaggtgtacaccgtgatgggcagtatcctcaggctgaagagtgagtccaggtgatcgagtctcatctgctgccgatttaccgggctgatcagtgtcaatcccggttcgaaagacatccagtccttcctggccgttcacttggtcgcgaagtttggtttccaagcgctcgaatcctctgcttacaagttcatggaaaagggacttcgcaaggaagatttcgccgcgattcacctgttgaatacgccgttcgagttgttgggcgcgtcggtcgccgccaaatggtcacgaggagaccggccgttgaacgcatggcaacaggcgttctggccgaggtacgccatcgccgcgctcgtcatgatattgttctacgtctttcccgagggacatgtaggaccaggttacatgggggctttcatcgcgatcaccttgatgggtagtttcgctaggtgagtcggctgcgcgcaaagtcacggtatgaaaggaaaggtcgtcagttttgaatgttgactggatattttccatagtaccgtgcaattcgtcggggtcacggcgtttcatacccaaatcgccgacccgttgatcggtggcacgtacatgacggtacgtccccgcaaatcgacctgattcacgtgatttgatgactcatatgccgcttcaatcgatagcttctcaacactgttacgaatctgggtggcacctggccaaaagtaggtagcgtcgtatctcttgaagaagttttctagctaggctgacccttcgtttacgatgtacagcctgttgtactgaaaggtatcgactacttcagccgatcatcctgccggataaaagaggaaacgggagtgatatccttacgaggcaagtcgagtcggttttgaagctctgcgttgcacatcgattctgatcgtcacttttgacttgcgtgacgcagcggctgaatgcatctcggaccatggtcgcgcgctttgtgcccaggaaggtggcatctgcgtgaccgagagggacggttattatgccatgtccgtgatctgcatcgcggtcggcgtgaccgtcctggtcatgttcgtgttgcccactacgcgccggctacagagtgagtccgggcagttgtccagacggtggcggaggggcaggccaaggtacggattagttcccgtcgactgacgtagcgggtctttctctttttcctccttgattcgctagatttgccaatgtccgcatggagggtcaaaatcccgacctagcgagtttcgcctgtcggcttgtaattgtggggatggatctacatgcagtcatgtcgacctgtttcaggtagcctctactgccatgagtttgggatggagtgggaatcgagggttccggcgggagtcgatttacgaatccaggcacgcacctacctgaattgaacgatacggatgatacggatgacccgctgctcccttccggctccccttcccccccgcgcgtgtgctcaaatgatcccggtcgtcgggttcgggatgttcaagcaagaactggttgaacgaggttcgacgggaagtgatgtcgtggaaggttcataccatactagatctgcataccagaccgtagccttttcatttcgcacatccgccagaaattacaaacactttcataaccacagacattcgggtcctcggtcatcatgaccagaatgaccgactcggctctcgaagaagatgaggaagactgccgcattccgcccgacctcgactttcgatggtgtcattccggttcatcccacctctcattactctcgacgcccttgacgcagacaaaggctgtaacctatgcggcgttctctgtactggaaaatgagaacctcgaggccgctttcaacgccctcaaacccgctgaaagggaggctgctttgcggaagatgggcgagtggaaggaggacaagaaggacgaccaggcttctagtgccgaccctgaagacaagggtacgaagggcgacaaggaaaagaacaaggaggggaatgtcttggtcggtgacatgtctgatatcgataggaacggtgggaggaaacccagcttgacaccgagtctggatgcggagaggtacccagacccggattctcagcctatcgagcctataccggacgataccctggaagaagaagactacgacaaggtcaagggagtccccgtatcacaggtaggttcctgtctgtcattcctgtggtcgtggcggcatgtactaatttcgccctcttatcgctggaaaggacggactgttcgaggtggacttgcgcaccatgtccctgttcccggtattttgggctcatacgggttctcgggtaccggtcatcagggcgacctggttcttggaggacgagactaaaccttgtagctgggagctcgccgaggagctagagaggggttatcagtgagtcaagatggcagagctgacaagataggcaaccgccgatgctgatggcacggtaaacagggaaatcaaaccctggttaccatcctaccctcaagagctgcagaaagccatcgaacaaggagcttctgctgaggaaaagttgaagcatccgttgcctgccaagttcaacgtcggcacgagcgtcgtctaccaaaacaaggaatgtgggcaattcatcctgtgaatagattacgtcaactcacggacaagcggcttgtagttgacaagtccattttctcttagatccgggatgacttcctacttgaacaaactgttctggacctctttccgatcgaaaccgggtggaatcacggtctaccgcggctattcagctgcgatacgaggaagcgggcacgaaaagaaacactctgtctctgctcccggatccaggaggggcagcacgagttcccgtcgaggcagcacgagcagcaatatcagcgctggaaacgaggaaaagaaggataaagacaaagaggccgaacccaaggacaagtcgagggcaaagtcggggttgaggaagagcttggatttcgccatcggaacggccggaatcaagaaggcccggtcggatagtaacgagcacaagaagcaagagttgacggtccctccgcctcagagtcgtccgaaacgtcaggtctcccagatcatggaagaatctctcaacggacagggggagacgtatcagaagatgaagccccaggtcagggatgcactcgatgaagagcaggttccgatgactggtgatggagatgatgaagaggaatgtaccgatttgatcttggtcatccatggtataggtacataacgtcaaggtgattcaaggcagaccgaggctgatgaaggggtccgattttcaggtcaacagctcgccacaacttatgaaggattcaactttgtctatgccacaaacatgctcagacaagtcatgaagtgggtttcaggacatgtacaaacgcgggatatggagctgatctcgagctctttggcataggcaacaatccgctaatccggcattggcgagcatcataagggatcgacgggtacaaatcttgccgattcagtggcgtgcttcgctacaattggctgaacgcggcgacgaggatgtccagcatggccttgacaaccgattcacgatgtcaggtaagaggctttcttggccccgcgcctctgcttcgagatgattgagctgttcacactgctagatatcacgctaccaaagatccccgcgatcaggcagatcaccaattcggtcttgctcgatgtccccctcttcatgtctcagcatcggcaatccatgatcgaggccgtatgcacgcaggcaaacaaggcttaccggatgtggtgcgcgaggaacccagggtttgatagcaaaggacgagtgcatatcattggtcactcggtgggtgggatctttgtgagatcaaacgatatgcgcgtggactgatagcacttgatttatacagctcggctccgctttggccgcgcacatcttgtcgaaccagccgacacaaatgcctcccatcgcagatctgcctaaagtcgtcaaagacgatgccaagacgcaattcatcttgtgagttgttggagacgaagcgaaccatgatggtaccggctgagtcgattctgctcgatcagtaacacgtccaacttgttcctctgtggctcgccgttggggatctttttacatatcgatcaggctcaaatcatccctcgaaagggccgagagcgcacgatgagtgagcaacgcacgtcccaattctgctaaagtgttaatctcaccaattgaccgcttgcagactctcctcccgatgaagcggtaggtcgcgtgatcgagcccacctgtgtggacgttgtcctgatcgtatattttcatcccttccagcttgatcgtgccggacgattcgggtgtatggctgtcgatagcctgtacaatgtttgtcactactcggatcccgtagcatataccctgacggcaaccgtcgactccgaaatcgctcgcgatcgaccgccacttccgatcacgagcgtgacctcgcccttttacgcgaccgtgaccgatccgatccgggatctgggcaaatactttgacggtatacctttcatcagtagcagcgggagcgggacaccgaacaagggcagcaaagatgcgggcggtgcatcagggacggaaccgcaaaagaagccgatcatggttcgtctgccaagtggtatcgaggtaggtctaccgttcacgattttgagccgggacgctcgtgctcatctcattgcgaaatgacagatgctgggccctgcgggtaaagaacggttacaggggtctcgaggggagaggcgattgaacgctctgaacccgcacgggaacatcgacttcatgttgcctagcgcgggcatgagcgagtatctaggtgagaccccaaacattccaatcttggtcccaccgcgacctttgcgtcagacatcggatattgagacaaagtcgaccgtttcgccctttgcagacgctttgaccagccacggagcgtactggtctgatcccagctttggagctttcatgctagcaggtgagccgccgttggcatgtaaactcttcgtctgtgccgttcgaacgccttactgacaaacttgttcacccttggaatgagtagaaatctactctaccaagctcgacctcttgcgcacaggaatgggtctggccaggcaacaaggcattgggatcgtaggcgccgaagatgccacatgaaggtctgcaggtgtcgctttgaatatctttttcttcttccgtacgaaagagagggtcttgttctgtctactatacaggcgtcgtgaacacgaaagatgccggcagtcagggaaccgcgctttataattatacccatatcttcaacaagtcggtcgcacaaagacgagactaaaagtcgcttcgacgactcgagcaccatgcagcacgatgtaggtacagactcgtagagcaatggatcaatgagccagccaggatagaaaggtgctccattgaccttggcagctctgacatatcaattgactcccccctgatcagttttgtgatcgtgcaatcgtctctctacgagtacattgtttgaacgaccaacgtagagaggacccctcaggtcctcttcaagagcgaatacatagatgcctggcgaggcaccaggcaaggcacgactgctcaagtttacgtccgttaagcacgactgtaaggtgcgcatcaaggtggaacatttagcaccggagaccgcttcttgcggctattcgcgtgcacccacctgtatatgctgagaggtaatgaacccaggacaaccagcaatcctcacagataccttgcccagctggggattggccgcgacacctattgcacacagcccctctagatggctcgccaggatgggtaagtgcgacagtctcatcatttggaatcagtcgtaatctggtcagtgatatcagtagtgaggatgtagcaattgtgacgatgcctatgtagagtttagtagcgtcacttcgaagtaggttaaagcaccaagctgcaatggcctagtctgcgcacaactttgcaaggcgagcttagcatcgtcaatttgcctacttggatcgaccgcttatcactgatatcattgggctcttctctggcaactcttcttccttactttggtgattcgataacctcccttgaccctcacgtctcgcgtctcgtatgtaaccgttcctcatctgcgaagcattcgatccatgcatccatgtgatgctgccatgctgatgatattttatccgaaatagaacaaaccatcgctataacacagcgcgtgatagattcggggcgcgcacctcaaagccacacgaggtgaacctgtacctcgcccgccgggttgtgacttggcgtgcgagtttcggtcccgagcggggcggaggacgcggcgcgacgatgagatggtgctcgtagcatgaaagctttcgatggaagggctcgctcctaattatggcgggtgtctagtctcatgcgtctctcccatgtaggcgtctgtgaactttacagggggcgctcagatgcaacaagcctgcctttctcggtcggccgatcgggcaacgttttccggagaaagtggtcacgggacccaacccacctcgaccgatctgtttgttgttgtttgttgtttctcgtctgtcgcggtcagcggtagcttccaactcgtgcctgcctgtataccagatcatggcgcagtcgagttggcccttcgatacagaacgatcggccgctccgggtcagactatggctatgcatatttcgagtcatccggctgtgtaggtcgcccaggtcgaggtcgaggtcgaggtcgaggtcgaggtcgtcgacgccttcggggtcgtgtgtcgctcggcgagtttccccggcgagtatttcctcgcttagctcgtgagctcgtcgacctcggcttcgggacgccaccattcgtctcgtgttcttgtgcttttgacagggccgtgtgggtcgtggtgtgtcggggtgtgtacggtgggagtgagaagaggagatgttcggatacaagcaaggtcaataaccctgaattccctgaaccgagtgcaccgaatttgatgctgtttaccccgcctctgccctggctttctcccccgcttccatcgatttcgcatcacatcacatcgaggacctcgtacgcattttattttggtagtctcgaaagactggaatctcgtccaaactcatacccaacagataatcgatcatcaatctcacaggtatcttcgctcctcgattgtatttgtaatcgagctcagcagactcggccattgccccaccttttacgtcgtgaccggcgatttcgtcctccctcctcgcagcgaaggcctatcgttcctcagccatttatcccccggggaagcgagcgccaagggcaaaagaggagaaaccgacaggactcgtatacccccatcgtcgaccaccttccctttacatcgtacatcgtacggccactcggacttgaacttgctttcctccttgaggcttcaagtagcatattaccacgactacgagttggtcttgtcacatttcgagatcgataccactcgatctatcaacatcaggtccggatcgacatcgtccgaatcggtcgtgatcggatctactccctggaacgacaaggatgctcgaaatcgactctcccctttccccacgacatacccgtcgatccgccagtccaggcccgggtccttcgacgctccaatctcgacgatatctggctggtccgggatcagagtcgaggatgggggatgggaccaggaaggttagagggagacgggaaggagagatcagtcgtcggcaggaacaacaacccggacaagaaggtggtgtgacgggatcgggcagcgggactgaggggacacccatacagacggggacggggtcggtctcttctactaggtcgaggccgttattctttagcgggacggcgtccagtaccgccgtctccactcctcaaccctatccgacagggacaacgcagattaccgggtccatgaccaccacaatcacctctcttacgggcgccaatgacactctcccggcaactgcgatcgcaacgggcaacgacaccgtcgcggatcctgctgcgacgggacccttgctcacccccagttcaaacgcatggacaccgacagccaccgcggcactccccggagcgtccaccctggcggtctacgtccccgtcgctgggcaacctttagaacagggccagaacggattgattgcgaatatgagcttgggaggggacgatatcgatcagtcgtgagtatgattcgacaggcgatctatcagaatcaaagggctaggctaagtgcgatgtgacgggggtggcgttcgcagggtatattccgtcccggtggtctttgggcatgcgagtacaggacagaacagtaggcggttggacaagcgggccgggaattatcagacgatgaggttggccgtggatctcggaagcagtgatatggtaagtcacttgtcactaacgtctcgaacgcgtttcagtcgaggttgaccaaggtcgaatgggcaatacatgtagtggatcgcagcgtccacgtgtacgacgtcggattgtaaaggctcgggggttcgcaaattcaacgcgggactgagcatcgattcggggcaatacatcaatctgcagtatcatcaaggatccgtagcgggcagcgtgtactgggacgaggtccagatcggggtgaccgaggaacagatccagacgagcgtcaacgggacaggtcgaggaggcgcgacggggttcgatatcgggtttcaggcgttcatcgccgcagaccaagtgacggacgaggatctctcgggaggcgaattcgatggaatcttgggactcgccttgcccgccaactcgatcattcagagtttcatccccgggtccacgacgggtcagccggacggagcgacctttttggaaaacctcttcgggcttggaccgggggcgccgatcgggaggtacgtttcgatgagcctcgaaaggagaggggatacgaggacgacgagttcgttggggttgggcatgtacgacgagacgctgtgcccgggcaagtgtgtgccgaattacagccccgtgatcacctcggtccaaggaccgctatactggaggatcctcctgcaggccgtcaatgtcggtgagtgcgatgtcagggggaccatcggttcgaaattcggactccgctcatgccccgacgtgacccgacttgacagctgtctggccttcggatccttcgtcgggtcccgcggtgaaccatcgcattagtatgccgtcaagcaccgcgacacagcagagttaccctgtcgcagtcctggattcgggaggtagccaaatgttgtttgggaacagagatttcttaaattcgatttacgggatctataatagtgggtcgcacggatcaacagagttgccaccatcacggactgtattgctgacatgacactcgatttgtctaccccttagtcggtccttcccctgatggcaaatgtgagcttgatagccaggatatcggtacacaattcctcttactgacgagtcgcacattctcaagactacatgtcatgcactcagctgatgtcgatcagttttacattcaacggccaggactatccgatccacccgatcgacctgtcggactacacgagcgattcgagtcattgtatgggaagcatgcaatatgccgagggcttggcagcgggggatgtgattctcggtactacctttttgaagaacgtgtaagcagcgcgtgcccacaaatcgagcgagaccgttcctagactaaagtcgtgctctgttgcagttactcggtctatacatatccggctagctcgaccaggacgagatcacaaccgccattagtcggtcttgtctcgcttaccaacagctcgcaggcggcttccgaattctacgccgttcgggaccgtcaccaacctttgacgccggacgcttccggcaatgttggcatcacacctgatcccagcgccgcaggtcgagccgtttcgggcgggatcatcgccttgtcggtcgttctcggattcgtcgctctggccggtgggatattttgcgcctggttcttctggcttcgccacaagtatggacaggacggggttatcctcggagccaaagctcgcaagcgaaaaggatctcagcagagcgattcgggagcaggtctcgatggagacgatgacgaggtcgtcgatgtcgttactcgagcgaggcgggagagaaagttcaagagcatgcagagacagaagagcatgatcgacgggtattctgatttcgatgtcgacactacctggtcggccgatgcggctgacagcgttacgaccggtggaggcaagggcgaggacgatcctttcaggacggacgtgacggatggacttgtcaccctggacaaggacgccgggatgggattgggcgcttccgccagggatggatctgcagggagacgaagccgagctcggatatcggcgtgggagagttcttaccctccgacagggtggaaagcgaccgatacttcgagagaccgttcgagcgcaaggacaacgaacggcttgggtccgggaatgagcggaaaccaagcgcacgaccgaacgggatccggttccaccatggctaccaacacgagcggccagacggccgtcgatcaagccgatgagcgatcacgttccgcgctagagaggttcgcggatccaccggcttccccttcgagagaagccttgttgggtggaatgcgcgccgagggatacgagatgggagttaggcagagtacagtcgaaggagagaaggagtatgcagatggatcaattctgaacattacggatccgtctcgaggccaacggtcgtgaagatggatcgccgtgaacggcctctattaattgcagttactaagtaagatctgcagcacagatgatggacaatatttgggtttctagcagatgatataccttcgaatgcattgtatcgtcagccctcgtgagaatgaaattgatgaagcgcagactccgcagagtctttcggtatgagtacatctgatcgatgttctagcacctctcgcggattccgaccggtgtgagaccccggcataggtctatggtaagttgccagcttgagactgcgtggctttgtcctgcctttcttccgtgaccacagcaattgtagtatattaatgtgctgcgcgactcaaaggcaaagtcgtatctatcaatatgcaccgtattgattccccctgttgcgtctggatctggaccagcggaaagaggtcggaactctgggcgatggtcctacagagatcctgctcaattcgaataacacgactggacagaccttgctatcagaggatgacatgacgtatctcaccaagattctggacgatttgccggcgaaactcaaagaagagcgggactacatcctggagctcgctttgaaatacagcagtagtgagaatcgacggactttgatgagtggaaaagcaagtcagccgcatatctactccacatgggtgactatgctcagcatatggacaaggtaggtgatgcgattgtcttggttcgtgagcaggacgccccgccggtgttccaagctctcctccaccaagccgtacccttccgagacccgacaccggaggaaggagagatctgcaaagtcgcgttcaatcgcctgccttctgatgtgcaatcggctgtgggtactcccgaacgaatggcacaagtgtatgttgccggtggtatgcacttggaatggcaggttttacagacagagctattctccaagatgtgcaccgcatcttccaccctaatgaagtgtgctaccgccgctcaaacagctccaatagacgaagccgcgagcagaatggaacctcaataaggcccgaagcttgatgttgaactgtcgtagagcaccgatgagattggggcattattctggttggcatgagtgcatgtagcagatcgcagctgaggctgatttatagtttcccatctgcatccgatgatgattcgattcgcgtggttagtcgggtgcacaagtgtagcgtcgcgtgagccggggtcgcgtgagccatgagatgtgcgttccaagggggagggggaggaggaggagggggaaaggggaaaggtgtcagccagagtgtcaggctagagccacccagcctgagcctgctaggtgaggtggggagtgatcgagagtgccgcgcgtgaggcgggggggggggggtccaggtcgagaaaggtcacaaccgagagcagcgagcgcgagacgacgatgacacttgttagaagcgcaagtctctgcagttgttacgaatagcaagcgcgaatcgaaacgcggaaacttgctcaatttcaaatcagggtgaaagtggaggtctttgaacgatcgtctagttcgaggacggacacaatcaactagatcatgtccgtggggaggccgcagcacggacattcactctattcttgcatgtccgcgtcacaactcgatcgaccttttgaatccatctcatctcatcggatcaaaccgcggatacctccttgacttgccacgggccattggacggtcccgtctcagcgaatcggaatcgactcaaacgacggtggtcgtctagcgtagagttagacaaccttgttgatatccaacatcatcatcatctatcccacacctgctaccccgtaatagttcctcgcctttcgtattgcccaccaccaaccctccttcccaaaagactctctctctctctccgtctctctctttcgaggaacaaatagacttttccgaatctacacacatacacaccccagtcgtcatgtccgagctcacttcctttttcggatccatggtagagatggtcttccccacgtgagtcgtcgtcgtttttccggagcactgtcaagggatcaaggcggggagtctcatgctcacactttcactctcgctattgctatcgccattgtctctgcctgttattcgctcaactcgatcttgatcccgaatccaatcgacctacccatcacctcgctcgacccgaccccaaccccgactcacggccaccacttcacctcgttccagtgcctacgccgaagcccccgcccctaccccatccgaacaagacgaagaagaggagaagcccgagcccgaggccggggagaaggaggaggaggaggaggaggctgaggaagaggaggaggaggaggatgagcctgaggatgtgagtatcagagtgttctcgtcggttgggcgaagcgtgcgtgtcgtttgtgtatgtggtgttctcggggacgacgacgacgacgacgacgacaatgaggatcgggatcggggtcgggggtgaaacgccggacccagaatcaggatatagatcaagatcaagaggatggcatgaacgaggatcagcgctcgaggacacgaggaccaaggcgggatttgaagcgggattcggccgggtagtaccaatccagcctccaggggatgcgttgatcacaccgatacggagcacgaacagtcggggtccgggttcgaggtcgcacctggctatttcccttcaaggccggacttcgacgcttcacactcgacacccggcgctcgatcggagcttggtccaggtcccagtcccaatcccctccaggaagagcctatcgatctcctgtccatccccgaccattctttctacgggcgacgacgcgctcgaccttgtccccccgggtcctcaatccgattggctagtgcaggtggacgcgcaagatcgaaacctttctcttgtttgaagaggggatggtgacggggatcatcgataagcgctccggtgcgggctggtgtgtccgacaaatcgggcggcgggatcaaggtcgtctccttcaagctggactccgctggagtcggtcatcaggtcgatcgatcgaacatccacgacggtcgaggccggtcggtctttggccagatcatgctcgaacgatactgcagatcctcaagcaagcgggatggatccagggcagcgggtcatgttcgcattcagcctttggaccgggagacggatcgacgatccagagttgtggtgtcgaccttctccgtgcgtcaatgcagtcgtcagccattcgcatgaatcgcggtcgcggtcaagctctgcacttcggttccgcccgacccagaggctcgcgatgcatacgccccgattcggaatatcatctggatggcaggtgcgatgcgacggaacgctgcccagcgaacagcagacgcggagagatcgtgtttgctcagcgacgaaacggccgtccacgcgcaaagcctttctagcgtcgcacgcgcttcataccaaggccaggcggacgcatcgacagtcagcctaccccggtctctcgacgtacccctatctcgatccagggtttcgtaatcaactttcacccgcgacaccgcccacggcagtcagaaaggaatggtgcagccttgacgagcgtttattctcggggtcatgcaacacctcgtcgctggcaaatcgccaggccttatcgcactatcggcatcgactttggtcttgcatacaactcccttacgccccaccctggatacattccgtccgacttacacgcatgactcttgctagaacgcgggttcgcgtgaagtcggaagagcgagcaggtggactcttgacgctgtctggccacggggcggttggctagtctggtcatccgcctcctggacctggaaattcatccagcttcaacaaggcagttggattactaaatgctagacactgcgcgggtcgagaacgaatcgttgggtgtgactcactcctatgggggagccagtcgattgggacggtgcaattcgcatgtacccacgtggtcaagcttgccatcctgccgaaggagatcgtcccgtcactggcatcgttttggtctcggacggatacacgacgccttagcccctcgtctcgtcatggcttgacacgacacacacacacacactccacacgcacgccgacccaagactcacatgtcgacatatgactgaccgcaactttttttatcgcttgaatttagcccgcacctgccatccgagccgagtgtgaaaagaccaaggagtgcgcccccgccgcacaccacttcaaggcttgtagcgacaaggtcgagagtggaaagggttgggagggcggtgagtcgacggcgagcatcctgatgacccacacagcggctgacctgtcccctttacccttggcagaggactgtgtcgaggagctcttccacttggtatgtctcgtgaaaagcccgtgggaccgtgcgtgtcagcgagctcatcagctgttcccttgcagatgcactgtgtcgacgcctgtgccgcccccaaggtgttcaagcgattggtctagacactttgtcacaagaaaagtggatccgtgcttagggagtgatcgagatcccaagcgacgccgatgaagggcgtgggagagggtgttgtttgtaccaaaacatgatcacgggtgggcaaagtgggatggatgtagatgggttcggaaagaaccggtgggctttcgtttattagcattttgaatcgtaacgatcgtccggctgcatcaggcgtctcgactcgtgatggtaacgggacgcctggcgtcgcgccgtgtcccgaggctcagccgcgtccgattcgctcagagccaggtgaaacgatcaaaggaagacgcgatgatcacggcgatgcctctcctgctacttatgcctggcggatttgcgtatgttcaaccctcacatctgtcccagcctaacaaacggtcctaccgcacaccgtcacctgctcaaactcttccgctagagcagtcaaagcccaaaccggtcaactctgcaagcgttaccgctgcataacatcgccatgctaagagcgatggaaaaacgtgaccgccacggacattgcgacgggtatgatgaaagtagtccgcccattccaatgtccctcgatcacatacagcaccaatcacaccggatccgtggcgcgatacgctgtttcttagacgcggccacggatccgcgcaattctgcagaatttctaggtcttcaatttatggtggaagcggagcggcaaaccgagaaaaagagtcggaaatacttccttcgtctgccgcagacgaagtcccgtaaagatttgagtcccagcctgaaccgcttgttcagggtcatgatagagagtcacttcctgagacgaaggtcgaacatctttacgaagattggctgcttcatcgtgaacggttcattccggaggtccaaaaactcttgcaaccgggttctcctctagcattgtcgttaactcgatggatggggcatcacgcaaaccgaaactatacaaaaccatggcttatgtggctgcctgtaccgaacggggacgaccggtaccactgccaacccgagtctttacggttatcgcatctagtagactcaagtgactttgtgtcgggaaccaccgatactactattgctctccagatagaagtacctacgattatgccaacaaaacatccgaacgacacaactgtgtcgtgcagtgattttgctggaccttccagtcaagcaagaacaatcactcattctttcgatagcgatctcttgaaatcgaactaacgggcttcgaatcgattcggtcttattttcgtagcctttggaacgatggggtccgcgttgggaagagtgttccacctagcaaaatcctctcgctttgtcaagtgtttccacaacctggcgctgttgtataccctgagagcacgacaacagtcaactttgatcatcagcgatgatactccctggtccagcttggtctcgacaacgcgcacccaacaaggcttcacgataaatgattcggcaagaatgaaaggaagaggtatcgagtgatggtcagttgatcagctgtcgcttgttgtgagttacaactgcagctgattcgcgtcactcctgtcgcgacaagataggggggccttcctttcttctcacaagcgatatagcactcaaaaaatagagtgtaccacgactagcataaacaggctcggcggctcgcatagatctggagccagaggaacattgacacatatcaaagcgtatccctcttcccaaccctagcactgagctatgttgtggtgcttttcgaatccattaaaaagactttcaacgcgagacgtaccgctagcttctgatggcgcagtggtcagtgatcacgatgaggatgtcactgcaataccgatgaacttggaccatctgctcaaggagtctcgtcactgtctcgggaccctaaaatgctatcccgccatttatcatgacgaggaggatttggtatgcctgtttttacaatttatcctgctactatcgaaagatcacatggcgcaaataccaagccggccattagaccgcggagagtggccccatgccgtttgatgtatatatatttgccgctcgaagactttgctctgcaacggcaacctatcggcaagaactggccaaggcatggcgatcgtctcgtacaggaaacgatgagacttttaattccaggatcctcgttttgtgaaagccttgctacacatctggaaaaccgcttgaatgagcgatcggagctacactcgctgtggtcgcccaatctacaaagatgggcttcgcgcctggatatggaaatcgatcctgtcattatgatggattggacaaggatggcaagtcaggcaagtcacgatgcaaagacttgggatcaggacaccttggtaacttcatcagccggtacgttgaggacgattgcctcatctcgcgcgcacattcctcattcggaaccagaaacgaaacggacgcaggaggggtccaccgtcagtgttagtgcgcatgtcccttgaaagctcaaaatccatggcgcaaaacacgcagcgatgacgcaacgataagatgacattgtgctttgacgacatgtagtatcgtatcgtttgtgtctgagattttaggctgttgataggatatgattcatgctgctggcattcagaacgaaaacggtctgttcttttcgcttgaagtcgaccgggtggccagctttcgaccatagccagccttcgtcaagtctaaagcaaacggcgggcccagaatttgatgcacgctgatctcagctacggactaaacgtgtccataggccgccatttacaaccatggtccagctctgtcaatcgttcgtacagggaaccgattgtggaaggagcacgcgaaactgatcgttatagccgcgccggcgtgatgtcagatcacgagggcgcttgaagctttgcgtgcggcactaggatgacctcctttcagtcgaccgacaatttggatctcctccgtctctttaactcccttgaggtcaatactggagggaccattgaatagatgcacttgggagtcagaacggtcgatgatgacctctcgcatgtcgcaggtacatcgtattcctggcggtagttagccatgagcgactttttggtggaattccggaaacttcaacaagctttccccaagaaggcgctgcccccgagcggacttaggaattgcttttcgttgaccaatttcgacgccgagagtttacaaaaagaagacgttgttagatgttacgttactactgctggttactattattcaatgctgaatggaaagttcgtctcgttgatcgtgctcagtcgccaaaacactcttcctcaggatcaccccttgtgcggaatttatatcccagaggttcccaccagcaattgcatttcattttggagcgacctgaaggcagtgaccgatcatttaaaagaacgtctggagcgcagtcatgggtcagatctgatgacaatggtccgcaatgtagcgaacagaagactcgcatcgttagggggtcatcatgcctggcggatcgatacgtttcattggctggcgtaccaaccaagacttccgattgctatggaagcacctgcgcagccagaaaccgtcggagagagttcgagccaggtcgcacggatgagttatgctcctatgtcgtcagaaacgaagggcgcttcatcacttacgcgtgatgacgcaaagtctgattggagcggaagcctggaaggacaaagtaccgttggttgctggaaacctctgactgtgatcagcgggcaatggcttacgtcacttatgtcctcgaccaagatcagtagccggttcaagcaaaacgagagtaccgagtagtgatggcgacgttggaatctgatttgagtttgtggcgtacacgagcgatctagagtggaaacgggctgtctggccgcgatcatgtggtgttactatcttagctagcgccaaatccatgatatcgagtcaaatggtgttagttttttgcatagacgttccgccaaattcaatcagatgacgttggggcatcgatactgtaaatcaccccccaccccccgaaggtgcagcgtattttcagagaagccctggagcatgtcaccaagtcgagcaaacaatgttatcattagtatcagtcattcctttggcatcgagacagtatcagcatacatatgcctgatatgggtatgggcgtagcgagttcgttcgaacattgtataccaggcggaggccaggagaattagcactcctcatcaaacaaagtttgcacccggatatcgataacaccttccctgaaaagcattgaacaaaatcccttggtagacaagaaaatagggcaaggtcttgttagggtgaccagaatttaccagctcttgcaagacgagggcggtcaacttggccgcccgttcgttcggctttcaaagtccgtttttaagcctttcagagtatgttagccagtatttcaggttggatgagatttcgacacgctgagataacaaggagaggaaatcatcgctcctaccttcagcaactggaacaaagggagcgatactctcacctaagtgcgtagcctttttgaagatctcctcgaatatgacaaatttcgcgattgtgattggccggttcatcagctccgtcgatctctttgtggatcagaaacctgagcgaggggtgttcaacagcggtattgagacagtcgagtggtagccgacaagtgacgatggatagtggctgcagggcgaagccgcgcgctgaaggacggtagcctgctgggatcgcccttctcgcggtcgcatgagtctacggatagatccacgggagaagtctccatcaacggactgtcaggtagtctggccgtctctgagcagacggcaccgaaagccagcaacggcacttcaaaccgggattattgatctcgcgaaaagagccggacaagctcgagcttttcccttgttgagcagacgagagatcctgatcatcagcttcaatgtccggtgtgtgattgtgccgccaaaaagacctgtatctctcggtgttaacatttatcgatacaatgctctctatacctcgtacaaccatgcacttgatgtttcgtctagatgtgcatctatcgctcgccctcctcgccaccttcgtccttgagggcccatccgcgtccaaactcctgacccttgatgtatccggtcggactggagagaccgactcgtttggcggtagcggtgactcggtcttcggtcgagagaccttgtagggggttgtagcggatcaagagttccttcgatagcagaaggcgagatttggatccgaatggtacgggcaagttttgaagaagggttgtcgtaggaaatgaggtgtattgatgcagcgacgagatagagcggaatgggtcgcggtcagcaagcagttcacgcagcttttcagtctcaacggaacgtgaacttaccccatgcagccgccctgcccggacaaactgggtcatctcgttcatgtttctagtgaactgctgatcctcctttcctcctgagcctcgcttgtcatcatagatggtccggagcatacccaagactgcctgattccgtcgacctcgaggttgaatggcctatagtggaggtcataagctaaaggtcatgagcgacaaccgcagagaactcaccgatcgattgatctcccggagagcggatctgtagctcctgactaacgatacggacgaagacattttgattggtttgctgtgaagtcaatgttggctctgagatatcgagaggcaaccaaatatcaggcgattgttcacttcacatcatcacatatgctcgatcgacctactttggctgcgcttcttttgcgcttttatttggttccggctttccacttttagcttccggtatttgcagccgaaccaactttttctggttccgggatcatctttcctttatcagattcgagtcgatcgatcatttcatagagaatcgaatccatcgctgaatgaccgtgagtttgtcttgatatccctgcaggtttcatctagaatcacccttcgaagcataacatgtccgttcaagtatcttccgaacagcttcaaaagctctccgactgtctcctcaacgtcaagggcgacaccccgctgcacgaacgattcagggcactctttacgctcaaggccgtcggtggagatgaggtcgtagagatcgtgtcccgaggtaagcctcatgcacaaacgatgccctgcgagcaaagcgactgactcacatgcccgcatacgttcccaggctttgccgacccttcggctctgctgaagcacgagctcgcctatgtcctcggtcagatcaagaacctcaaggccgtcccccacctagaggccgtcctcgtcgatgccgacggtttccagggagagatggtcaggcacgaggccgccgaggcactcggagctctttccagtgtggacagcttggagctcctgaaaaagtacaagacggatgagagcaggagcgtcagggagacttgcgagatcgctgtcgacaagattgaatatgatcactttaccgaggagggtcgagccaggcagttggagtgagtgcctcgtcactatgcaactggtatccatcagtgctaacgatgtgcttctgagtatagccccaacttccctacgaccgaccctgcgccggcctcgcttcccaccgaggacgaatccactgaatccctccgatcgatcctcctcgacacttcggtccccctgttcaagaggtaccgagccatgttcgcgctgaggaacattgtcgcccgatcgtctggcgtcaagggcaaggaggaagaggctagggccggtgttcaggctttggcagatggtttcaaggacgggagcgctctcttccggtcagtctgggtcgagttgatgaaaccatccgccgtcatgctgatatatctttcttcgccattgctcagtcacgagatcgcctacatcttcggtcagctgtcgtcgccttactcgatcccctcgctactcaccgtcatgagggactcggcggaggacgacatggtccgtcatgaagctgccgaggctctcggaggaatcgcctccgagggcgatgagggtgttgaaggcgagctctacgagagtgaagaggacaagcagaagggtgttttgggaatcctgcgagaatggagcaccttggagagcgctcctcctgttgtcagggagagttgtcaggtagccctcgacatgtacgaggtaagtcactgtttgtacaccgcacaatgtgttcacggaactgaggaatgtcgtgtgttcgacagtatgagaactcgaaccagttccagtatgccgacggactcaaatcggacgacacggccgctcctttggagcagacgcccgctcagcgattgacgggcatggataggggaatcgacttgacctcgatcatggcctgatgatagcgccgctcgttgttcattagatgaagtctctgccgacacttgtatcatctagcatgtatagtagatgtagtatcaacgcatgacataccttttcgttatcaggtcgtccatactgcagagtatcgatgaacagaaccttggcattagtatcggactcgtcaaattcttcgtagcgcgatttaaaccgctcggacagatcgtgcgtcgctcagtcgcatcatgagtcccggctgattcgccagatctcagacaccgagttctacgaaatctcgaagcgttttgtatctcgcgggagaaggttctttgggcggcatgtaagaatggcattgcgagttcaggagctgagtaatggctatcctttagatacacgatgtagaatcttgttcgtactagctcataatatgcctgtcccgctgctcatagctgtctctgcgtccggtagcggtatgtatgcgatgtagcgactctctttgggaacgatcgtgacacatctgcccttgtagacagaagacggagcccatacgaaagaatcgaaatcggatcctgtagacaggatgctcaaagtcgaagccaatttcgtagcgagatccgtatctggatcatccagcgctgaataatccaaagttgaagggatagagctaattgtgatctgatcgcatcgacgcgggtcccaggtgtcacacgggagagaatggtgcggacttgagcccgcttgaacgctcatcgtcaacctgatttgatcgtccagccattgaggttcgagcttttctaggatgtctcctccaggccaggaagctatgggatagattcctaatgcatcgggagtgtaacgactactttctgcagaggtagcctgccagtgagaacgaaactcgctgccagataacactttatcctcgatcgtcctttgcatcgtgtgaccgagcaattccggtttatgattcttcaatgctatcgagccgtcccaataacgtctgatgtttgcccgaatgtttgatatatgactccagttgacaacgaaataacgggtttggtatgaggcgtgagtcttcgggttcgcaaggctttgagtcacatgcatcagcatgtctccgttactttggggtcgaaacgcgatccacgtcggcaggtgatcagtaccatcgtccttgatacagactgaaggtccccatgtgttgtaacgcttccatcgggtagccatgatagtaggtgcacaaggcagatgcagctgtctatgggagaagtagcaaataatcgggacgtggctgatgttagggtagttagatcttccttttgctaaattagcagtatttatatgcgaggcaggaaatttacatgggacaaaggaggagttttctcggcttgtggatctctccttgcctgagatcctcgtgcccttttcccaacctagaaagccaccctgagcccaggtgctacggcttcgtcttacggaatccgatccgtgcatgtatcctcattagcggatcggtaatacagccaatgcgtttccaggtgttgccgacgaatagtgatgatagtctgattgtgagctgatactggacgcatgctgaagatctgctgatcgatcagagctcgctctattgatattctgggaatcaccggccgccgtgctgaaaccgcgaaaaacaaaacagaaaataaggttctcgcttgtacgagagaatttacgtacaggacgttgcagaatggccggaggcaattcacgggatcaaggcatccagttttgattgtttgtcaacaaacttgacgcccggctaaagtttgtacgttaccccactttcgcaaagatattccccggattccagagcacaggcagagcggatcgcaggaggttgggtctcttcgcacaagttcgagttctcaactgatctgatccaatcgatttggagctcgtagtcaatcaacgtatctacatagccaaaggacttttcctgccatcatcttctacgaccattacggactctattttcacgaccttcccctgctcctcctccctcgggcgttccgtttcaaactgaaactgtcggtttggaacgaccgacgaccatcacatcgcacggacgatcaactcaatcagcgacgactttttgatcgaccgaggacgtggccttctcgcttctcgttgcatgacctcatcgacaacaacacaacctacactcatttaacaattgctcgacatcgacttgctacggctacacttactttactaccacgctcatttcctacctgcaatccctcgtataattttgatcaaggctccacagcgacacctctccatcacttcggatcgctactcgtccatcttcttgccatcctttccaccgacgatccaaacgcgtatcatcagaagactttttccgacctatcgatcaataacgcgtcgagagcaacaagaggatttctcttatttcttagaccatatcgcactcctgcctaccacatcaactatcataatcgtctccatccgagtcaacctcgttttgcaagacatttgttcgatacagcgatacctacaacttccaggatcaacttgcttgtccgggctgacgacatgatgacgacgatcacggcttgatctaggacaacctttttttccccacaaagtaaggcatccctaatacactgctcgtgatgctcacgatctgaccacatactttcaccgaatacgatagcccattgcgaaacacacttcacactcttttatctacgagcacactcatttgccatcaattatacggcttgaacggccatcacaaacaccatgacctcccgaacgcgtcaccctctatcccttcccccgcctcctcaaccacaaccactcgctactcctcccacatctccggaattctcgccggcggcctttggagcctttcccaagccttccggcgtcatccctcagcccagaatctctccttccaaacgaatattgcgaaggaagaaatccgggctgggtgctacagcgcgcacgaagaagtccaaggaacccgttccggagggcaaggagaaccaggatgaaaagactacaaagaagaaggccgcaggcgaggaacggtcgggacgcctagtcagccgcctcaggagcgtgagaagcgtgccgatgttgagcacaaacaaggacaacgacaccgtcaaagatctgttcagctcgactaccagtgtcaaaaggggctcaggcaagacaatgtccatctctatctccatgggagagcgagaagtattggccgaagagtctgatcgtcagacgggtcgacacggattcaagccggtcgatcatgtcaacgacgagcacgcgcttcgacggtaccctacttcgctatcttcgacatcggacacaaacatggtcgagttcggtcaactcccctcttccgccgaattagacgggggcttcgggagtatctcttccagaggtggtggggccgaccgcaaagacccgactgcctggcaatattcctccatgtccagcgggaccgcttcgcatttcgcttcaatctcgggctcatccgcgggccagaccagggaacggagcgagacagtgaccacctttggcggtgctacttctggctcgggatcgccgcgatcgactacggcgactatcaggatcaacctgggggaggacacaacacctagagcatggacgggtagaagacggagcagcgcagccagtgatggtgtcgctatcggctcgttcggcctggacaggactcccggcactgaaagtaccgtcagagctggagctttgggtaacgagagcaacaaggaagatgtttatcgtcgaagtcgagacttgcagcggattgtcggcggtgacgcagagccgagtcgtgctgtgcaggacgatcaggggtcgatcgaagagatccgggacactgaggaaatgcaacaacgtttcctgcagcggcattctcgggactttgcgcacttgcatggtgaggccctggcaagcatgtttcagcagtcagagcgacagagtctcgcctcggcagcttccgtgctagcagaagcatccaagaaccactcaagcgcgcgcacctttgacccccgggagaccgaggatgaacgtcaacagcggatcatcgaagaggcacgacgtgaaggccgcgagaaacgacgaagttggatgctgagcaaagctggattgaccggcgggccaatgtcaccaacaacaacattctatggagcgccgccaacccacacgagaaacatgtcgtccatcagtagtatgatgtcgccgggtgtatcatctcctaggctcggggagatgacgcctagggcgcatgcgaggcagaccagccttcgaggcggtattcggccattgtccctagtgatcagccaggagaatgctcgtgcccgcgagtccggcggtaatatcgtcttgggcccacctttggttaccagtcccgtgccagtcgtcttcgaagaagaggaaaagagcgatgttgtgggcgagatgacccggtccgattccaccttttcgatgagcgcaggacacgaggatgaaccctacatcagtcacgccaggaactggtcgagcacaagcgcccgcggccatcgtagaggcagcatgtattcgagcggttcagggtctgggtcgcagggttcggtctcgcgatcggtctccattaagagtcatcgccgaaccatgtctccggctcagcaagccttgccgccccatttgcgcaccttctctgcatcttcagtatccatgacgaattcgtcgatgagctcgcttggagctgtcattggaggaaattccgagtcgagctgttcctcgggagagcatattgggggacctcgagttctttcgtccgaagcttacaatttccgcatgagcgttaacgcgcctgcgccacgagccgaaagcaggatgaccaactctacttatgccatgggatcattccgaaccgaaagtcggctaacaatgcggggaccgaccccggatctagacctagacggctcggacgatcgagaaagcagaatcaagcgacgccgtgctagagctttcttggtggccggtctcaagctcgaaagcaagactgcccgtcccgacagcggtgtcatgatcgagcaggatgaggaccaggggtggcctttgtcaccctcggagggcaaaaaggaccgtcgtgccggtgtagtagtcgaaaacaggctcgagctcgaggcaatggaggtgatgtccgagtcgacaccggtcgagaggaaacgatactcggtgatgcgcagggaaaaacaagacggacccgtcttgcgtcgagcaggtacgccgctattccccttcaataccatggagctcccggacgtagatgaaccagaccaggaggtccagacatcatctggaagccctgaaatcaccttcagtgcggtcgacgattcgggcacgattagatcaattctgccagtcgaagaacacggcccacttccacgggacgaatccgagaacagcctccaagatccgagcgcttggcgagcacaaagcggtgagatgatccgtgagctattctggctgccaggtacacgtccgggtgcagcaactgcggtcgagggtacaatttccgatgtggcaatgccgtcgactccgggtcgccccagctcgggcccgacttcgcctgccatcatacatgccgactcggcaggagcgtcgccggggagggaaagaaagactagctggagcaacgcagcgcgaggttggttgcggagcgataccaagccagaccctgaagcgcaagttgagaagggttttgggtaagttcaactgcttaagatcatatagttgcgatctgccactgaaatgtctccgatcgtcctttagccttgggcgtgggggggacccatcaaacactctgacgtcgacgcaggacgaccatccgtcgactcttgctcgggagaagaagagctggaagcgctatttgggcggcgcaagggggaagagacgcggaagcctgcccgaggccttcaggcagggcgacttgtcgactcccatcatgctacaagcaccgccagcggctcacgttcgtcgatcgacggaaccgtcttctccagccttctccgtcgcgtcgcccccgctgccagcgttctcgacgatgaggagccaggactggtcgcccttgtcagcggcttccttttcccctcagactccagagtgtctgaccaagtccccaggtatgcgaatcgtcttgcccagccaagcgccccgcgcgctaggtatcggacaaggcgacatcctcttgcctacgcccgggacatcgcagctgaggaacgtgagtgatggggcgtcgccttcgagaatggacatgacgggcgaattgtacggacttggactgggtcctgttcagcctgtcggttggaaaggcaagggcaaggcggtgggggagaacgaagaggcgttgcaacgccaagccgcagccctggcagccaattcggcgaacaagtttaactttggaagcctgggccgacgtccggatatcggtatccacgcgaagcctgccgcatcgtctctcggagggcatgtccagccgcccgcaagcgcagcgctgaggccatcctcgccgacctactcactgtcgtccgcgagcgacaatgagcaggattgcagactaaagcctcgtgctgatcagcaagagtacgccgtggaggctgctagcttgccggcttaccacgaccggtctattgtcctcaagcatgaaaggaggattctcccggcaaagttctttttcatgctcgggttcttgttaggaccatgtaagcaggcgtgatcactcgcgagaagatgcgtttcgactaacacgaggaacttattcataggggtctggttactcggaggatgggcgctatctccaggagggcacttcttcccgtcatcacatataccgcttggccttggccatcgacgtgacccacgtttcagccctcagaccacgccggagttcaagcaacgtggcatgcgctcggtgttcccccccatgagccgagatcggcctgaaaagtgggtcaagcgtaatcgactcgccgccgctgtcagctcggccgtcttcatcccggccatgtgcgtcggattcggctatttaggtaatctcttgtagcctcgtcgaatgggttcggacataatatgaacatattctgcagtctaaattaaaaacaagtcgtttgaggctgtctcgcttgaacaaggaggactcagaggaacaggagaggccaactattaaaactgaccctgctttctgcgggagatgcgatctatacggtcgtccaatcgaccgctttccagagtcctgcacgttgtcaagaggatgggctaccgacgatggtccctgatctgcggagtgccatatgatcagagcctcggagccatcaggtttcctcatcctgtcgctcaaatctgcaagtatagtagacgtgtcgtcatatacttcattcgctatcgaggtgcaggtgccggagtcgcggcccggaagcttgaaaaaaagtatacggggcacccaatccagatccgaattcaaccgcgtcgtttggcaccgaaagcttcgatggccaaattctagacaagtgtagtgatcagcaaggtgcaactctgcaacgcaatcagattccctctgacccacatcactgtcgtagagtcttttcgcacacctcgggtatacccgcctgatcgccttgatcacatcctctttgaagaccatgagccctgccacggcttcgagccacgaatcgatcgattccttcctcttcatccccatttcgaattcccgcacgattacggcgagcgtatagtcccgaagagtcttttgagggatagaggtaacgatacctagatcgtatggcggacgcggggggaatgacagatcgtaatcgagagctaccagaagatcgctgtacagcgtcttgttcaatgaggttactggtgtcttgacggatgggaggtcgaaaggcatgtcggatagggtgacgccaaaggaggttgggcagaacctgacacgcagaggtccaatctaacatgtcacatggagaaggaacccgatcagtgacagcatggcgtaaggtgtggtttattatgctaaggaacacgggatcgactcactgtgagacttgagcttccgaaaattgggtgccaactctatcttttccaggagtaggattttcaggtctcgagtttggcgtgaaagaagcttcgttgatagttgctgtgctgatgaggatgtaacaactcgcgaactgactggtacatgcttgcatcaacctgtaacctgcagcatatcgcacgtcgagatgacggaatgtaatctcgggatgatgtcttccttgtcggcctcgtcgctgtcgctgcgtcgcttgttgctgttttattcgtagtaaagttgacgtggatcaacgatcgaccgcaaactcaaccaggagaaaatccctccctgagttcttcttgcttttcctgtcctgtcgccctctatggtggctttgtgctcgaacagcatcaccttcttaacacttttctgaacgatccagttgtcagttgcctggttgatctggttgacccgggtttgatcacgctctcgaaacgctcggtgattgcgatctcgtgatcgaatgacgagaacacggattgttgcttccggttgatatgagaaaaggttccggttaacgatgacgtacatattcttcccacggccgcggtcgcgcaggggctcccgatgtcggtgacttggtgctatggatcgtggggtatagaccctgtcgacgtcgtcgtcgtggaccaaaccagagccagcctttcgagtgtgtgagagcgggaatccacagtgccttgtcgatgtgtgagaggaatgagcccgtgaatcgtggctaaccaggctgcacactgcggcgccgtgcgagatataataaactaatgtctcgtgattttccccgcgtcaccccccccttctggccgccccccccgctctcgtgaaggttgacgttatccgtaacgatatcatcatcatcatcatcatcatcacctaacagctagcatcattcataaccgttcaacgcctgttcataccactcacaacaacggcaaactcgacgtcgagcccatctcagtgactggtctcagtgactgcctcgttgaataaaggttcgtcgacccagagcgcaatatcgcctccaaggtcacgatcgcttgcttgccctccctaacgtacacggtgctgacgagaatcgcgtaatcacacttgacccccacccaccgctctcctctccattacggaaaccaatgcccgacccccctcgggaaatgcctaacgacaaccattccctaaacctttaaacgttgaacattgaatccccccctacggcgtacgacgtgcgactcgatcgtccatcaaccgaaacgcgctgccctgccattcttcaggccggctcaattttcaaccgtcgcccagagacccagagacgaaatcgatcgcgtcgactcctcaacccaacgacctcgaacgaccacctcacagatcgactacggctcatctacaccgtaatcgacgcatcacttgtcctagctcccaaacaagctcgacctgcctctgtcttggccaatccaacgcgctcggacaatccacgtctagacgcgtccccctctgatcagacacgtcgttatggctcaacctcaacgatccccactccctcccaacatgcaaccacggaacgagtacccgcaacctcccggtgggaacggtgccggtttccccgtcgagcagagcggtagcaaccagggtaaccagagttcggctggctcgggcaacaacaacaataatgggaacgcgaccggaccgcaaggtcaaggtcagggccagacccaggcccaggggaacgacccttctgcttcctctccggctgctacagggaggtatcccgctcctggttctcagtcgggcggggatcctcaattcggaggtttccaaggccagcagcagcagcagcagcagcagcaacagcagcaaggtcagcaacaacaaggacaacctcaaaactcggggtaccctcactttgccgggttccccggccaaggaggacaacaagctcctacctctggctcccccaacccgggtaacaattccaacccgaaccctcatcccaatgcctaccctcagcagcaagggcaacccggacctggacccgtggggatgatgcccggcccgtacgctacgcacccttaccaacctcctgggctcgcccctggcagtacgagcggggggaaatccggtcaagagggtggggattccgatcacgacaaccggacgaggaacgccaaggctcagaagaggcacagggagaaacgcaaggcgcatgtcaagggtgtgagtacgatgacgcgggcgcgtgacaggcagggtgggaactcatcgattcgttgaatgtgcttttccgcggacaaacagttggaggaacaggtggcgttcctacaacgacaagtcatggccattcgaggtcccggttcggctatccctgagcagtaccctggctcgaactcgacccccggttcctcttaccccttttatccacccaacgctggacaacaaactccgcaacagcccggagtgaacaacgggacggtccacatgagcgtatcggagcatcggcagttgacgaaccagaacagctttttgcaggaagaggtagcgagattgagggcggagaacgaggtgatgcgattgaggctgaacgagcgggatgcccaggcgggcgggcatccgaagacggaggacgggtcgaatgggttaggagcgaccgcaggcgcaagcacggggtacggacagaggttcgagggcgatcagcaacaacaacagcagcaacagcagcagggtgccggtggataccctcaagccggatcgtcacaatctcaacctccagctgttgcttcgtcccgaccgaaggcggaggaatctccccgtcagcaacagcaacaggcgcagccgatggacgaatcgagcggttcattcgagcctagcgggcaagttgctgccgcaccgggcacggctacgtatagcctgaacgcttatgcgggcggaaacaccggggagaactgagggtcggagaaaagtcggaccgtcatcgatgtcccaggagccttactttaggaccattcgaatttcgtttttatacaccagcgcacagagcacgctctttgattttctcaccttttaccttctaccttgtcgaccagtcggtccgtctctatatacacacgtgaatcatgtcattgaaggacgagatgctgcccgtgtctggctggaccatgcgaatgcggttgcaaggacgtacctgcagtcaacaggtttgggctttgacggggatgtgagggaagctcaaagccaactggcgtagttttccgccgtggctcgcgcaccctctagatcattactacgttgtgcttgcacctgaatacatgcttcaggtacatactcattcttacgatacacgacttgtatgggactgaacgtcgattgttaagaggcacaaggcggtgctcgacgagatccgcgtgtccgttcacgctatgaatggcctcggggcgaccgatccgctcgcaaaccctatggcacgcaagggacagcatgcaagtgtataaaggcaagatgccgggttgtttggttacatcactcccagtctgatctgctcctttgttatctatttgacgaaaagcagccctctccgtcaactgcgccgttgctatccttacccctgactgggactactactggacatagtatcggggaggccgccggaaggtttcggaagcagattcgcctgatccgagattcatcatcgtacaacgtcgatcgagtacgtcactaccgtatatagcaaccatcttgcaacttgcatcttggacgatatcaatcacaatactcgttcacaattcacctcgaaagcaagacttgtagtcgctatagtcgatatacttcagacgctatcagatttccggaacgacatctacatacacaaacacgcagaacatggccgaacctcagcctgccgtgcaggacgctcctgttccgttttacaagacggtcaagcgggtcagtgtcatctctccggtgaacctttgaggagtattcccactgaacgttcaatgttatggctccagtccttcaaagacgtgagcatggaacccggtatcaacacggacgagttctgtgaggccaccgacgccgttgtcgcctttttcggtaagcgacgctcaactaccggtcgaggatgatggctgatggggatcatgcagacttgtttaacaacaaggctttccaggtggtccagaacgatctatccacgaagaacgccgtgggtacccaaaccttgtcgatgaaggctactgttgcccctgctgagacggtgctcctcgcagaaagtcagggaacgccgcagattgcacccggagacctcggtcacgctcgaagatatcctgcgtaacgagaaggagagtaatgacatgtacgccaccggagcgttgacatggttacttcggtcagtgagaggctacgggttttgatgcgggacccaagctgataacggtttaaatgcggttcccagcggtctccgattcacgagtctcgggttgagggagaacatgaacaacgagaaggaagagctgtcgacttcgatgtcacgggcttatgaccaaagtttgcgacctttccatggcttcatgatcagacccctgttcaaggtgagcatgcagcttgtacccattcgagatgaaggctgatcgggattgactgtacccttcagctcgccatgaacgtctgcccgtatcgagccaagttttacccatccttgggcgagcccaccgatgtggtgtgagtaatcttgaatttgccaggctttcccgatcttgggcttatctgcttctccgttaaccttgcagcatggccgaattggacgactggcttgccggtttggaacggatattacagcagatgagcgcgttctacaaggagggcaattacggcagcatcggcatgtgaagcgatgtcgacaagcgaatgatggagaggcagtcagggaatagaggcctgtgcttgtaattgtgttagagaatgctccaacttataatcagttcttgaaccaagtggcaagtagaccttgtccaggaaacgttgttgttagtatcctctcagggtcgcgaacagtctcacctctgcgaaatgtaaacaaccatcgaccttgtgctacaccttgaccttgctccgaggcttgtagttggtgatggtgtcctgctaatagcatatcaagacttgatctattctccagccttttcatcaaaacgatacagtacacccacgactgacgaatcctccgcctaaagcatcttgtcgagcccttgatcgatacagcgcacgcaagatgcagtaccaggaggcccgacttagatcgttcgcatcagcgacgatcaagccgaaaggtcgaagcaaagcgaaacccagctcggtgacatggccactatcccctacaacgtatccaaaccttactcccgagaatctctcctacgccggatactattatgctcctctggcagacgatatggaccagtgtggatgtttcctctgcgactcgaagttgggcggttgggatgaaggtgacgacccgttcgaagagcactatcggagaggcaagtgcggctgggcaatggctgtgtgttctgtgatggtagacgagagaaaaggcggtggcagcgggaaacagacgggcaaggctaggtgagcatagtcggatcccgcagctggactaaccaggctgacccaaaagtcgactttcaggttgtcctatgacgatgctgaccgattgccacaatcggagaccatgactaaagcgcgtatcaagactttcgctaaatggtggcctcatccgatacggggttggacgcccacaccgaccagtgtgagcaacaacgcgttcctgccacttggcttactggcctaaccgtagctttgccttcacagctcgctcgtgcagggttcgtatacacgccgaccgagcaggagcacgactgcgtgacctgtgtctattgtgattatagcacagtgggttgggagccaaccgatgatccctggtaggtgaaggcctcttctcaacatcccgaaggtcgaggctgatccgttcatatcgctgcagggacattcatcggaaaaagaagccgagttgtagctttttcaaggccaagctggccggtgcgactgcttcggtcgaggcatccgaagacgaggtgagtcgtcatcgtggctcccaacacaaagacgaaacctgatctttctccatccgctgcagctggccatcacagcgacaaagaggtgggtcgacagaatgtcgattccattgagatcgtagtgaactgacttttggtaccgtttgctcagacctgcttcacgcacaacgaaatcgataaaatcaacgaaatctgttgcgagcacgacacggcgtacgaccaggaaaccagcagcatcgatcatcgaccccagtgatacggatgatcccatatcaactatcgatgcggacgagaccatcaaggcacctgccagtcccatcaagagcaagagtcgggcagccaagacctccaagccagcgacaacggctcgaagtcgaaagactgctgcggtaacatcgacggccagtgcagaaccggcaacaaatggcagcgagacggacgagttgcaagccgtcgtccagtcggaagcccaggtggaagtcaaggcaccacccacgagaagagcgactcgagcgactgtggtcaagaagcctgccgctgcacttgctaaagcggcgctcgctccaacgaaaagaagtaaaaaagtggcagagcaaatccctagctccgagccagtgaccgaaacagagcaagaagatgccgctgtcccgctcgtgccaaagtccaaagggaaagtcgcttccgagacgaccgttcgatccaagcccgccgccagtgctacagcctcagccgttcgagccaagcctactgggttaccgaagctgaagacacctactgcagcacgaacgaaaaaggtcgctccgccgcctccacctccgcgtagcgcgaccgatcaaagcgaggatcaagacgaagaccgggatagagcatctccgacaccaatgcaaatcgaccagccggatccggaacggatgaagatgatcgatacgggtgccaaagaggctcgctcagtgatcgaatccttggatcaggtcacaccaggcaaatccaccgcctcgacaactcccgatactgcgctcgccctcacggacgaacaggccgacatgactgtcgttgaatacatccgagcgatgtacgaagccaaacatcaggcaatcaaggccgaaggagagtccaagatcaaggcatgggaagatagagctcgtacggcacgagaactggtacaagggatgagatgtagagacgatggcgaataggagggatttggagcaggcggacgggcggaccctgttgattacgactttgatatgtgataacgacctagatataatgagccttgtcctgctttactttctgatattcaaaaactgtactgtcttatcttttgtaaagaacgaaggtacacaaacgggcaggtgtaaggcgacgatctgacgccaaaaagagcgtggttgccctctcgtcacaaggcggtagtgcgcgggccaaggacaaggcgatagcatccatgagcaagctcagcgggaaccgtcgggcggaaagagattacttgacgaaattagtccagtggactagtaatactcgtcagagtattaagaacagatactacacatgatcaaagccaaaaggcaacagaaatgtacaagataccgatagtcgatccgaggttcaaacaacaagttcagtagtcaccctctaagtcttgtcgcgcgcgcgcgcgaaactctgacttcgcaacggaaacgaacgagcacttcgaggtctggcgcaacacgttgcaatatcgtcttcatagggttaaacaccattgaagctcattcaaaagcctagagatcagctcctgggacataactgagtagaagcaacttgctacatgacgagactcccacgtagcccgttatggtggaagttcggttgtctcgcaatgacgcctcgactgtgtcgccttcgtggcgaccgatgtgggcaattacatttcttgtgcttccaacccgttatcattacaagaatagccgtgagcaggatgcgttgacctcagcgattgaacagtatcccgagtcagtcgggatttgatatgcagatttgattctgtgttcgaccggacgaagatgcgcctcagagtactcgaaacaaaacaagccattctcccagatcacgcgagagcgaggagcgatcgaaaccttactcgaacattaacgacacccgtgaaggatttgatggcatctgagtggcagtatcgttcggaacttttccaggaaagttgcgctacgcgaatcatgatgcatgggtcatctgtccacgaagcaatcgacgttttacggcttgttctacctcgcagcccccctcatatttcattcttcgctttcacagtcggacgcgggtcgaacgtatatcctcatcgggcccacctgcggacaaatcaggacaaatcattacctgacgagcgcatgtgccggtggcaatttatgtaaattgctcaccaacagggacggcacgaatttacctggttcaagctgccccttcaagaacattacatcgaagatgtcttgtgatcatatgcatagtgttttcgtagtgttgccgggaccaggggtgtacactggaccagacactgtcgggtttcactcattagagaaccttgcctgggcatccattcaggagaactgtcttcatgggccggaagaaagctccatcaaaagatgaacatgtccacttgttgcctcattccctcgctcatcgtcaggctagcgctcctggctaccaggcatgccgaggccgttcctctcgagcatcaacctcacaaccactcaggtgcacctcacgactccagctgtatagcgaagccacaagcatacgcacgagggtcctcgtggagacgcagagggatcaagtggaaacaacgagacaacgagaggacaagtggaagcttttacgtctcgctaagggagatgacagggcaaatctgatgattgacaaggtgtccatcgatccggatctgacaagcgactttttggaaagtaggtcgatcattgtttagtaggtccttgaccgctttgcaatccgtatgtagcatcagcttttatccatgaatcaccggtataaatcgttccaatgcccatttgacatatctgagttgtgggatcaacgaatgcgagtcctgttccttctccaatattgtcctctgggatgcgaactcgatcgtcttagggtaaaccttccagcacaactcatcatgccagtagcttacagcttgggagtcactaatcgtacatgataccgcctaaaaatccttagaagacacgggtttctttggtcatcgaaatacgtaccagccgccaaggctcaaaagtgggttgcaaacagggaacttgagcgcacacaatcatcgccccaaatcatggtgtaacacccaggaccagttcacacgaagattgtatcgcctctccgccgcttgatgcaaggtattatatggctcgtcatatctatacgcgcaacaccatctacgctatgacacatccctcggccttggcttcctgacgagacggtctccccgccggtcgcttgcgtttagccaaatcttctatccgtttcctcgcttgctccgagccgctcgctgcgagattaaaccgtagggtcaggccggacgtcgacatggaaggagcccgggcaagactcactggctgcacgttgataccaatgtttggccatctccaggttttgcgggacgccgatccctgcttcgatatagtctgtacgacgcggagcgatacgcatgagtggaccgccctcgacatgcacgcggaatcgcccacagaagagacttacgacccaacgcgaattccgcctttggcaaccccttgttcgcggctttcctggcccagaggaaagcctcttgatcgtcctgtttgagcacaccttcggcacccgtcaagaaccatccactcaaggcgagcgcagcttcgggatctcccttttccgcggcccgactgagccatgcgattgaccgtctcggatcgacgggacagcccaggtgtccgtgctcgtacgccacgccgagcttgtgcatggacggggcgtaccctaattgagcggcctcggtgtagtgttccctggcggcctcgatcgaaccttggcagacgctcggatggagtttcatggatcgagggtcttcatagatcatggccaattcgtgcaatgcgtgagggttatcctcgtccgcctgcaacgccgcccttcggagccagacgagaccttccctcggattctgcgcttggcccatcgacccggtcaagaggatcatggcgagtttgtacatggccgcggtatccttgagcgcggcggccttgcggtaaaacaagacggccctgttcatctcctttctcgtccccgcgcccaattcgttgcacacggccgtcctatatgtggctgccgggtgattagccttgctcgcctgcatgtagagctggtacgccttttcatgatcgacctgtaatcccagctgacccgtcccgaacatgttggccagcaagaactgagcttcagggtaacctccttcccccttgccggccccaccgtccgcggcgagtcgtttcaggttcttcagactctctgccaagagtccgtccctgtacctcttgcccgcacgtgggtcagtggccgacatgtcttccccgatctttctcgccgcttcgatcaagtaccgagcgaacgcgaactgcgcttcggggtcgggatccatcttcatcctcgcccggtaatcgtctacgaattccttggtgtagggcggtttcgtcacatcgatggcggccgagatgcctttccgcctggccttgctcgatccgatcgatgtcgtcggggtacgatgaagcgagacgtccgaggtggaagagacgttgcgcagggtccgggttcgactgggcccggaagcggatgggggtgcgagtccgagatgatcgctcgcggcgaggtaaggatgattgttgtgagcctgggtgaagcccattcccgtccccgttggcgtctcgtcgtaacccccaccactaccccgtctcccaccctcgttctcgtacactgggtccatcccaggcgtataagctcggtctagactgtagacgctggcagggtatgtctgttgctgttgaggctgattcgggagctgatacccgggtccggcgctgttggatctggcgtaacccgaatgggaggacattgagctaggttgcctatagagcgggtacgccgaaccgttgttcatgttccgattcggatcgcctgatggctcgtggctcccgatactgagcctatcgaatccgggacctagatcatctgacaagggtctctgttgatcgtccccgtactgcgaggtcgagtacgaggaataccctcgttgaggtgcgggtgccgcagcgggtgcttgaggctgaccgtagtacgaggaaggtggtgatcggcgatactctgccactccgggaagtgggtacgattcgagcggaggagcgagcgggatgggttcgccctgttgtgcacctagagaatggctcgaaggagctggacgagagggcgcaaacgtcggtcagtcaggcgtcgcagtagggttgcacgggagtttggatggtggagactttcgacgacgacttaccgtgcctcacagctcgttggtgatcatccgacgagaatccggacgggctcgacgtctgtgatctcctctgtgggccttttgggtcgaccgtggacatggcgatttaaagtgtgttcccagatgatgcgggtggaactgcgagaaagggcacggattgattgtcgcacgacctggtgtggttgtgcttggtctaggttttcgcgcggccaagggtcggaacgctacgctctagatcactagaccaggtagtttattcgacgctaccaaggtgaagctgcgggatagatctctagaatcgtaggtatatccctttaatctacctgctgcaagtcgaccatcctgtttgatggaggggtgaatggctcgatgagtacgttggttgttgtgtgttgacctgagatttcaagtaaaccattcatcatcgaccaacacagtcatgtagctagctacaagttagtagccaggtagaactcatccatacaaacaagcatacaactgacgtccaagaacacacatcccatcagcctcgtaccttgctcaccgcctaccgtgtagatgttacagtgtcgaattcgttctaccgacctatacttcaatttcccatcgactgcgaccattcaatcattccatttcacaaagtaaacaacgcaacacacacacacacacagacgagcaaaagttcgagagatgatgatgggatagttcaacattctcatgcaaccaccaatccagtcaccacccacctcctcaacagcaacgcccacgctcttgaacctgttgcgccatgtcgatggccatgtcaaatcgctcacttcgcttggctcgcacgttctcccgtaatcgaaccaagagccgacagtgcgatcgagcctataccaccggccggacgtctatcggtggcgatcgaggtggattcgccagtctcggggtcaggaagggggacaagggtgagtgtttcgacgtacaccatccgaataaatgcctgagtgaccgtcgctgatcataggtatcctctccccctctccccccgtcttgccacgcttcatagtcgtggtggccatgtcaggcggggtcgactcttccgtctccctcgcccttcttgctagccctcatctcccctctaccgtccatccagacctcgcccggaaactcccctttggattcccatcttcttctcatgatcgacctgcagctctagggcagatcgacctggacccaaagacggacctagacatatcggccgtctttatgcgtaattggtccccgatgttgaacgagatcgatcatccttcatgggagatcgattgtgcctgggagaaagactgggaagacgttcaacgggtctgtcggttgttcgacgttcccgtccgtttggcaagtctacgtctgcgtacactcactccctcccgtcttcccctctctaaccgggtcaaatccggtcaaatcgatccattccatcccgcccgtgtacatcttgcaattcgagctaacgcccactttctccgacacatgacgcaccgggaaacccacagctagatctatcccaagaatactggctcaacgtctttgaacccgccgtccaggcctggcaagcgggatcgacgcccaacccggacgtctcgtgtaacaagcacgtcaagtttggttcgctcatcgacaaggtcttgcccgagcgtggaggttggcttgtcacgggtgagcggggcgggggacgggaaagacgtgcatggaatggagaactgacaatgcgtggctatataggacactatgctgctacagacaagacgccagcggggaggacgaggttgttgcgttcggtcgatgaactcaaggatcagacgtattacttgtccagctgcaccgagtctcaattatctagggcgagtgtttttttatcatcactcgatcgagctagctactccagctgacggtaccgtcgccaacattgtcatttcgataggccatgttcccgttggccaatctccgcaaatcgaccgaagtccgcgagctcgcgaaacacttccatttgcccacggccgaacgggaagaatcgatgggcgtctgtttcattggcgagaaacggggcaagtttggagaatttgtcggcaagtcccctcgcatgcacgtctgttggtatgaaccatggctgatggcgcggacggtgcacgttgcagctcaatatacaacgccagagtctaccccgggacacctcgtcaccccgaccggtacgatcctcggaagtcacaccgggttgtggcattataccattggccaacgagcgagaatcccggggatgaaggagaaatggttcgtcgccgggaaaagagtccgatcgaacgaggtcatcgtggtacccggtgcggaccacccggcattgtcttgcgtctcactgaggacgaacggggaggcgttcagttggatcggagaggtaccgcaggggttgaacacagagggaggtgtccgggcgaggtgtcaggtgagacacaggatgcgagacgtccccgttgtcgtccggcaactagggtgagtcctcggcctttccctatcgacgtgcaagtcgtcccaaaagtcggccctgacgactgtcgaattgtatcgtgttgttcgtccctgacaggccggatgtagaggttcgtttcgagtcgccagaaaagggggtcgcatccgggcaggtcgtaggtttgtgggatgaacgaggagactggtgtctaggcagcggggtgatagaaacgaccgagtgcctggagtagcagatgtggcagtaccatccctgcggtcagacgatagaaaagacgtccgacgtgtttcctcttttaggccatcgaagctgtcttggtgatgcttagagcacccaatcaaacacggtcgtcaacccggcggcaaagctgaggatgaggacgaccgtgctcgagatgatcattgtagcgagttccttgcgatcgggaggttggaaccctgatgattcgcccgcgttacctcgtaactcgagttccaggtccaggtccaggtcgccatcgtggtcgtgaccatgctcgtcaggctcgacggaggagcgagggtgagggttatcgtgatgatgacggggtggttgaccgcggtgttctctagcgaggaggggcgcgttgaggtcgacgaccgaggacgagtcacggtgggaggtcatggtggggatcgataaaacggtctacgatgcggccctttggatggagatcgacctgatgtggaagactgcttcgatgtatataaacgaaggtgaccaatgcaacgagttcccctcctctcaggacgttaagtgtccgtttctcggtttccctggagtctcgggtcagttgacaacaatcaccaaccatcaacatatccatccatcacttacccactcacttacttattcgaatcgtccctttcagcgaactcggtcacaaacgcatcactcgacaggataattccactgttgtaactccggccatgtccagacaacaaggatacggcgtggtagacgccgacgacgaggcgagtcccgtcaccacccacctgtccggctcacacggaagctaaactcctcgtcctctcttggtcttgcttgcgaaccagttcgccggtgatctcggcggacaagcagggacaaaccagctcgaatttcaaagtgagccggtgcaatcctgctagtcggtcagacgctcatggatccgaatctgacctcgaacgattgataccagctttcctgaatacggagggtgggaacggagctacccgaatcgaggacgatcgagcggggtccaaccgtcagttcaatctgtccttctctcccatgtcatgttcaaaaccctaacatctacatcccgcattcgacttcgttccccacccccgcagcccaggtgccgttctcgctcttcaacctgacctactaccaatcctactttgatgtcgataccaagactgtcctgcaacgatgtctctcctcattcatcccccgggaatctttcgtcgaggacgtatgcggatcgcgggtcgacctatacggtcagtctaatttcacctggtgaaatgcatgtcgtgatccacactgatactccccgctcgacgctctgacaggacctttttggatcttgaccaccctgatcctgacgatctacctgtccacctcgttgagcacggccctctccgtcggatccaccacggacgactcgggcatccccactcgaacggacaaggacctcactctgctcacgttcatcaccacgttggtgtacctgtacggtctggccttccccgccgccttttggggggtggtcaggtacctcgctctgaagcagggggggaatgagggaggatcggctacgtggagcttggccgaggcgtgggcagtctgggggtacgggatggtcgtctgggtaccgatcagtgtgagttcgcggtcgaggccggtcgagcgaggatgcaaggtgagacgaggcgagggagagactgatcgaattgggtttccattctggggttggctcgtttcacaggtcctctgcgtgatcccgatccctatcctccgatgggtgttagtcggcatcgcgggagcttcgtccgggtatttcctgtaagtctggcatgttcccttgcgatgacgagcgtagcgacgactctgggattgttcacctgatgccaccaccactttgcacttttacagcgttcgaaacgtgtacccagtcctgtcgtcggtgagtcacatcacgcccaccccatgcatccggcattcgacgatctcttgcctctgaacgctgactttcgacccctgtggacgccgccctctgaagatctcggacacgaaactccctcgcacgttgatcatcgtcgtcatcgtcgttcacactgtgatcacgttgatcatgaaattcgtattcttctcgtgagtcccggctcgaccgtacggcccgcctaggtcgcattgtatcattctttctaacgtcgactcttcccatccccgcaccccctcccggactcgttcgaccttggacctcttgatggatgtaggtacgcggtgggagggaaaaagatcggaccggatgatccgatcagtgatcagatcggagagatcatcggcgggggaggggacgacggggagatgaacgaggtggtcaagagatggtggtcatgatcgttgatcgaggttcaggggggaatagacggggtcgtgtcgggtcgttgcaagaggccaacaggtcatcatatagaaatagataccgtccaggccggggttcatgctcgacgtttcaaggttggcctcccatcaatcatctcgaaagatgagacagtcagtcagttggggtttgtggagtctgcggtcagctgcgagtccaaggtcaatcgtattttgacacggttgctcccggggtttgctcccgataatattccaaaaacaaacacagacgaggcgaggtcgtccgtcctctgtcttttctgtttgatgcgaaggtccatgttgaagatgatgaaagtgacggtcgtcgacgatccgagtcgttcgttcgagttcgatttacgtcacggtggtagctagtagttggtcgtttagagcaagtgaacgtggttggtgatagtccgagtgtaattccggccccgcctctgtctctggcctttaccctgctatttgtgcacagcctcgggtgacctcgtttccttgcccccacgaggttcgaaccatcaaaggaatcaaaaaatcccagatcgctccaactcacaacgtcacctcgacttcacctcgacacttttcactccatcgaccatcatcaccatcatatcatcagaaaaggaaaaaagagacatcctccctggtcatttggcgatatcagcatcggacgcataaagatctctctctctctctctctctctttgcttccaaatccacaacaaacaaacgcgcacgctcgttttcgctctcggcttgtgatcaacaaatccccgtattatcgcacatatcgtcgtcattctggaccagatcagacagaacggaaatcatccaccttttacctatttaaccaccgcggtatcataagaagcgtctcgtcctcaaccccgtcttcatcatgtgtgagtggtacatatctcgtaacaaaagtacggatctgacctgtgatccccccttgccctctgctgaatacatagcctccggtgttacctctcccgcggtcacgacctcggacccggtcaccacatcgaaccccgtaactaccagtcaacctgtgaccacctcggaccctgtgaccaccagtcagcgcgtgacaacctcggaccccgtgacgacgagcgacccggtgacgaccagtcaacctgtcacgacctcgccaggatcaaccagccaacccgggtcgacgaccaatgccgggacgaccagcgccggtcagtctcaaggtgggggtgggggtggacccccacctccccctcctcctcctatgccggtctccgaggtgagtcgacatcgactgaacactcaatagtcaagattctcatcgctcatgtgaacgtctagcccgagccccctgctcctgctgcacctcctatgcccgtccgagcccagagccaggctcaggtcaagaaggcgtcgagcggacctaaggccaaggcgatgtacgattacgaggtaagctgatgcgatcgaagtttaatccactgatgtgtctgaatatgcaaagctgatacttggggtgtctcgcgctcgaaacaggctacagaggatgtaagcgaacactacaataagctggaattcatagtcgttacgtgtcattggctgatcacgatacgcccattctcgacatagaacgagattagtttcaaggaggatgacatcatcgagggtatcgagcagaccgaccctggtaagtcaagccctagcccggtatctcgctccaggacactgatggtcgatgttcgatcttgttttttgacgacagattggtggaccgggatcgacccgagaactgggagcaaggggttgttcccttccaactatgtcgagttggtagaggatagcgcgcagggagagcaagaagaggaggaagatgtccctcctccacctcctcccccacctgctcctcctgctccggctgccgcaggtggcggtggcgcggaaagaaagggcaagactgcgatcgcgcagtacgagtgagtgaccggaggattcttcatatcgggctcgaggacgatgtttatatggagacacgtcgcgatagttatgaagcgaccgagggcaatgaaatctcgtttgctgagggtgacgagatcaatcagatcgaagaggtgagcggaccgtgatttctttggccagcaggaccgggcagcagagtggctgacgtggctgtatttcctagaccgacccggactggtggactggaactcatgccaagacgggccaacagggtcttttcccaggtgagttatccgtccgcgcgaccgaaaactgcgcacaggacaagggatgtgccgcgcacaggatgcgtatttgctgaccgtgtgatcgattcacttcgcagccaactatgtcgaagcatcttgatcgaagtttcctttctgatccgtttgtattggcactttctgaatctattctaacatatgtaaaagaagagtcattttcgacatggaatcgtatccaaaactatcgccctgtcattagtcggatgttgctgttgatgatgatgaaacgtgtctggtagctggtcgagatgatccggcaattgctattctcctctgttttctactctacgggacgcgctaacggttgcgagaattgcccgttcggctcggttctggatgatcaaaacaacaatctgcagcagcgtgagcaggagggaagcagagtggaagggaagaaagcttccggccatcgtggcgcagcggccgcagaagcagcagggccatcatttattttacatccggcaagtgttctggtttgattacattccgcagcgataaatggaattcgggcaaaggcaactcgcgatcgaggaactaatcgctagctaccagctttgccagatttgctagtctactcttttgacgttcaaatcccctagtctttttgatctggtcattcgtttctcatactcaataaaccgagaatcattcgactttgtcaactcgactctcgagtatcggtctccgtatttcccagtcaatcaactttataatttctggatcgaccgaactcttccctcgcgacacctcgaactcttactctctttctcattcgcctttgatccgatatcgtcgagatgtccgctgcagaatactacaacggacagagtggtcagaagggttatcaggagatgaacaacagcaatgataggggatacaacggtggctacaacaataacaacggtccttcttaccctgacccaaacaactatggtcagcaacaacaacaacaaccgtactacgccccgcctcagcaggactaccctctgcagcagcagaatggtcaacaatacatgccccccaactcggtaccccccgtcgcagctatgcattcgtcccagccctacgctgagccgcagtacgctgccaacatgaacccggacattgcgggcaaggccaaccctgctcaagcggaacaccgtttcaagcccaagaagaagatcaacgacccgatatttctcgtcctcttcatcgctacctttgccgggatgatcgtcgtcgctgcgttggcgatcaggcagttcgtcaagtacaacggaggtaatggcggatttggggataatggcgagggcgggacgggaatctccacctcgttgaactagtgagtccccctggcatttcggtcaattgcaggctaggtctggcgtgctcatagttgacatctcgttcgtcttgcagtcacacggtctatttgctcatcatggccagcgctctcgccctgcttctctctgcagtgtatttgctcgtaagccagtcatccccctggatcacatgatccggtcggacctggctgatatggttgtcgaacctgcttcacagatcgtcaggacattcaccaaggctttgatcgaggtcagttgccggcaatcttcatgtgtttccatttccgctgttgaacaagcgggctgtttgtcgggtagatcacgctcgctctgtcggtcttgctcaacatcgccgtctgtgtctgtgagtctgctttcggtccatcagcctttccaaaactgggtggacccaatggctgaacggatgcttgaatttgccagactactttactcaaaaatgtacgttgcgtcgacctgagggtttcgaggcatgttattcacctcaatgcgccggtatggttccgctctcatagactggtccggggcgatcatcttcttggtcatctcgatcgtcagcgtactttcctactttttcagtgagtctcatttgcgagcacgagaccgatctgcgggatattgacgaaatctgccaacgttcccttcagtgcgcaagcggtaagccgattgccttgtatcgcaatcctatccactttggctggcctactgacgccgctcccttgaccttcccatagaattccactcgcaaggatcatgctgcagaccatcatcgacgtcagcaagcaccacccctcggtttacgccgtctgtatgatcagcttgatcgtccaaacggcttttagcgtgttttacagtttcgccgcgatcgccgtctacgtcacttggaccccgggcaatccttgtgagttccgcgccgagcagatgacaatacactttgaagcagacaagctgagcatcgactcgttcctcgtgcctagcctgcgcgaccaactcgtgttcgagcggaaaagtagccggattgatcttttacttgacttttgcctatatctggaccagccaggttctcggtcagttcaaccggtgcgcaatatcgttcatgaggtaatatcactgacgccgcctcggtacatagctgcggtcacgctgatgactctagccggaggtgtttacggtcaatggtactacaacggccccaacgctcctcagctcaagggcgccaaccgcaaggctttcggacgggccgcgaccacttcgctcggttcggtcgcgttcggttccctcatcgtcaccgtcctggaaatcatcaagcagctgctaaatgcgctcagccgacaggaggccgcagaaggagatggtaagcgatagatgagtacttagcttccgttcggtcagacgcttattttactctctgcggacagccatcagtgctatctttgcctgtattgcggcatgctgtgtttcgtgcatcagctcgctggtgcagtacttcaacagtgagtgacagacttcctctgtttgcgatccgcttgactaatcctttcatcgcgctctgcagaatacgcttagtatgtagaatgcatacgggacttattggttgactataactaactttcttcacgtccctgatcattcaaagcattgagatcggtaagtctcgataccggcgtatcgtatatattcgcgagtcttgctaatggacatctttgcattcatagccttgtacgggaagagctacattcccgccgctaaagacgcctggaggctcctcaagcaccgaggtatcgatgctctcgtcaacgacaacttgatttccatcagtgagtctttatatatccgctcggggtgcccaagcagccgcttaccattccgtggtaccttgtatttagctttgactttcggcgcttacatcgtcggtttgttaacggcgctgttcgcttacttgtacctgcgctacaccgatccggcttacaaccgaagtggagagtaagtgaccgcccgaaaattcacttttgacatcatctgacggcgcgttgctcgtctgcttgacagatacacggcgtgagtctcagatgcagttacaaccgtcgccggtcacagttattgaccggatacttccacagacctgtcatgcttttcgctgcactcattggtatcaacgctgctctagccctggcctcagctctcggtacgctatcaaaatcagcaaatctcgtctttcatgttactgacctttgttgaatgaacagaatctggtgtttccacgatctttgttggcctcggcgaggacccttagtgagtcatcatgagcgtcagccctacggtactcctggctcatcagaacaatctctctgcagcgtcttgcaagagcgatctcccggcctctttgaggagatccggcagaactacccgcaggtggtccaacccattgggccctagaggggcaaacgcaagtcgctccagaccgatgttctcacttataattgacatgcacctcaggttatgtgatccgatgtcgtgcccgagttctgctccgtaattcagagacgttctacgcagacgcgtggaacagctataactcagttcaagtcgctatccctggatgacaccgcgggacgagacggtcacctatacaaattattcagtaccatgctcagaccaccgtcgctttcctgattgacgttcacttggacttgatcttgtgcacagcgtggctcgtcgatcagcgcccgcgaactttggcgaaagaggctcgaagtattgcagaaggggcccaaatgaccattgcctgcgatttgatatgcgtacgactaggcgagcagggcaaatctagatgtccaatagtcaaacgacgatgagctcggatctgcaggcaatgattgcataggccgtgccgtgattcgaatagagtttacagacgaccccgtgccagcccatctttagacaagctcctgagcgtctccacaacctcctcccaattgttcactcgctgtacgctccccggaagatcgagcctgcctttcgtctcttgctctcgtttgagacggtcggccatcgcttcacctttctccgattcgattcctctcaacactcgctcctgatgcgctttttcgtcctccgttgtgtcctcagcggtcaagtggctgttccaaggatatttgccaaacagtagtaccgggagaggaagttcatgtgcggcacaggtcaaggcgttctcgagcgaatcgtcgaccaagagacaagcgcccagagcgtgagcgacctgcgacgatatcaatccatgatcagtataggctcaagggtgggtgcaaaatcttgctggactcacagcagctttactcctcttcttggggggtgtagccgttgcggtatccggattctgcatggccacaaacgcgccagtgaagtgcaggctctcgaacactagaagggtgagaggggtaaggacaaatcgctccgagcagatatcggatggcaaacatcatgctcacgatcaggcatattctccttcaaccaaacatgtgttccaggctcagtatcgggtcctcttgcggttatcagtaccaggctatatccaggggcggtgacgtatcagcctaagctagtcttgccttattgtgatcgaatctgcagataatcaccggaaacccatgtcttttagtgcttgtagtccttccctggcacccttgatgggctcggcttgagcgagcaaaccccgtcggtacatcgtctaagaaatttggggtcatcccatgtcagatgagatagagcagctccaagccagcttggaccggaatggcttaccctgatcttctcggccgtttctgctcaagcggacggaaacgaacgatcagcggaacgttcagcatccatgacaaaatacttgcccacaggtgttccccatcctcgattctgccagtagaggtagtgtcgaaagtcggtcaactgcacaaagaagccggcagtcacggtcagcgagtccatgttccaagcttcatatagcttcagactcacccgcatcggtggatctagctcgtagagctcattatacactttcggttgcagggtgtatgcatgagcgaatatttgctgcgccgattcaacgtctgcgagcggggtactcactctcggctactttggcgttggtgctagcgagcacatcgtcggcgtcgaccgcgatgaccttcttgccggacgccaatgcctctcgacacaacgaatggaaggacattgcttttgaggtaataccgatactacgatagggagaatggagatggcggaacatgcagtatcgtattcccggaccgcaatcgagatatggacgaggtgagtaggtaaccagagatgctgatcgagctttgaacgtcaccggccgatcctatcggtgtggggcgacgcgaatctgatcgggtgaggaggtacacctaaattatacgtatacaaccacgatatatgaaccagtacaccgaaaagctaggacgagaggcgtggcaggcgcaagaatcttttggctaggcctttaatctgaaatccgcttgatcgttcgtctttcacccgagccgacgaccttgatagcaccctcatgctccagcgttcggacgacctcgttgaattcggcgtgatcgacaggaactgacgactgctcttcaagcgacttgacagcacgggtccatggcaagcctgcccgtccactcgcttcgagcatagacaagacctatattggcgcgtaggatcagcttacgatcgagagacaaactgtcgagactagctcttctcacctctctcttgagatctccgcgcaaccgtcgttgctgctgaccggctccagtggtgatcaggtccagatcgatctgcagataaagacagtataagcgagtggatgcgatcccttgcctccaacaacgacttacctgtccggtgataggatccgtctgcgttgaagaatttcacgattaaatcccgaagcgatggacaaagagaacggccaggactcacggcactctctctgatagcatctctaatcaatctgaaggcctccttgacatcttgcatctcaactcgctccgagaaacgcatacgggcgtgcgcttccgaaagacggatcatgctctcgagctgtcgagtcgttgctgtgattctcctttcttgtgtacgaatgtcctctccgactttccgcatctcgacgtatgatttgacgagggcgtcggaagcttcttcggtcagaactgggtgaattctggacctggcataagtgatataggcggtcaaggtttccacaggctgtggcaaccagaacgtttagcgcgttcgttcaatcacttaaatccatcgtcatttgacttaccaaaatgtcttgtccgctagtgtctggcctgtcttcaaggtaaagtccgaccaaatgcttggccagacgtctgtcgctaacttcgtcgatcttgtccaaaacaaggtagagcagatcgaatcgcgagatcaaggtgggaggtagatcgatgttggccgggatgggcaagcgagggttatacttcgaattgacagggttcgccgcggccaagatcgaagttcgagcgtttagcgtggtaatgatgcccgccttggcaatagagacggtttgttgttcctgcaccgtgtcataaggctatcagtatcatagtcaagacggagtcgtcgcagaggatctcaccatgacttcgtgcagtacacttcgtgtagagtcgctcattttgtcaaattcgtcgatgcaacatactcctccatctgacaggaccaaagctccactgcacaaagcaaagagcatagagcaaagtcaattcaccaccaacaacgatgccatgctcgattggcatgctcacctctcaagaacgagctgcttcgaatcgggatctcgagtgatgtaggctgtaagaccaacagccgaggaaccctttccagaagtgtaaacaccccgaggagcgatcttgtggacgtactgcgaagccctcaagctcgatcagtattctttcgaaagctgcagcagcctaacgcttgttactcacctgcaagatctgcgacttggaagtaccgggatctcctaccatgagaatattgatatctcctcggtaccggggcccaccgccaccaccacccctggcgatactcttgttggttccaccgaagagctgtaacaagattcccttcttcacatcgtccatctcccaaatcgagggcgccatggagcgggaaagtagatcgtaaatgtcatgtcgcgtcgacaattcgatcaacttttgttccatctcggcgttggccgatgcgggctggacgggctgtccatcttcttgcatagcggcgcggtctgcggcactgagcccttcttcctcgtcatcctccccaccgaccccgataccaggaggccgaccttcgctgcccctggtcgtcggatcgtatcccatcctggcgacattggtcctcttgacgtgtacgacgtcgacgtaggtcttgaacaaggccttgatcgacctctgacggggattcaggcggacaggaatcgaacggaagataccggtcacagtcaccctatcacctggtttgacgaggtcgacgagctcgtcataagcgcagagggagacggtatggggggtctgaccatcgggaacaacgtctggcggaaggaacggtcaacgtcagcgttccgtgcgttccccaacgcacggggaatgcttaccaggagtctcctgcaacctgacgacttgcttgtcggcgaattccgagcggttgtggatcaagctcatggtaccctgtgcgccacactgctctcgtggacacttgttgggctcgttgatccgaccacggtcaatctcttcctgttgggtgtgctgacagaccatgcatcggaagaaggctaccggagagatgtagcgttttagcccacgagaatccgtttaaggtttcaatcgccgcttcaagcttaccaagcttcatgtcaggaatgacaggagtcgcccggatcactagaccctttatcgagaccaacttgtcggtatctgtcgcaaacatcgattcacataaggtctctccttactgccgatttttcatgactttcgcaactcaccacccgggttgaggtcccgcatgttcacgctcctctctccgccgaacggcctgactttgtacaccctcgccgccatctcccgagcgtcctcgacgagcaagtccctctccaggccctcttccataccctcggcgtcctcattcgcgagctcgatcatgagatccttgaggacctgatccatgatagggatgacctcttgaggatacgcgatgagctgatgataaagtttcttggtcggggggtaagagagcaggttgagcgagtccaagttgaggttggtctgctgggtcaaccgcatggtgcggaggtaggtcaagtagagcgtctcgttggccttggtatggctgaggttgtcgtacaaagcgttgggaggaggaggagggggagcaaacgcatcgtcctcgtcctcgctagccgtcttggcgaccttgttataactcgcccggtacttgggtttaaagttgcgtaggaagtccgtgaacagattcatgctctcctggagcgcgaccgtcgtgccccagatgaatttaccgtccgtcccgtctgccgcttcaccgttcatgttctcgttgccctcgggtccggaaccggccatgctgagggtgggcgcatccatctcggaggtgagaccaaagttggccccgataggaggagacgatgaacgagcagcgacaggagtgccatcgaccgggacttcttgatctctccgaggtcgaactgaaggggaagaaaaggggagcgaggaatggatgtcccctcgacgagaccgtctaggtgttgagcctccagagctgtcgtccgtattttcattgaaagagtcagcatgtttcctttgaaagaattaaagtaatgccgagctgaccctggaaagaagagcggctcctgtgtacgtctcacggcggggctacggaataatccaccatcgctagacaattggctaggtcctgctccggctcttgaccccgtcgctcgtcttgcgctcgacccaagttctgacgaaggaaaggccaaaggagatgaagtcacaggcatacccccgtatcctgaaaagaatgcgagctggtcgtcagacaggaaggattcagcatgtcggaggaacgggaaacttacctggagtatggaatccagaggaccgagctgccgcattaatccgctcggcattgggcgtacccgctcgactgctcgacgggaactcgataggaggtgatgacatgcttgtctcgatgcgatcactgttttagcagtggatctcggtataccagaagacgatcgtttgggagtatgatctcgttctgaccaaagttcgactttgagattgttgacgaagagagaaagtgccatctcacccttcctcttctcccccttcctcatcgttccacgcgtcgacgcgattcaatcaaaccgcgtttgaaaggtcgacgcgtgggaaacaacaaaacagcggacgggggtgtattgaccatcgtggtcggatatacaactcgtactgtgtgaatcgtcactagaccgtgtacagtttcatcatcgccacacttgccaccactttctactcctcctccctctatctgacccgtcctccgcaagcccggtctcgacatcgctaccctcgatcgtgccatacccggacctcctgcttagagactggccaagcccagctaatagcccaccgccttgtcgaccttcgtcttccgatcccgtctcgacttgatcattttctgccgcagcggcttcgcgctgatataatccgagtacagactcggccgtatctcccggatatgcgaccgccaagatttcctgtgccgtgcgatagatagatccatcaacatccacgatgaagagctcgctcatcccgtccacgccagacttacgtgctcttcctcttgctggatgatgctcagcgcttcgtccagatccatgtactcgccacccttaccccgacccttctttgcggaagaccagtaatacccttcccgattgagaacgttgggcgagatcaaacccagcccggcatcacgttcaggatcgtaccccgacgaagcgttcgatccgagggtggacgtttccgcacgatcgtcttcctgtgaaccggcttccgagtcgcgagagacatcgtgtacgtggatatgaggtttatgaaggacggcctcgttctccccaagcccggaaaggtcctttttgaagatccgtctgatagcgtgacgaggtagacatcaatactccggctcggacctcgtcgccaatcgatttcgactgactttagtgcggtagggatcatcaccgccactccgatcccgatcaggcctagaacgtttctcagactcaaaatgtgaaagtcttctgcggacgtcattttgtcgagacccgaaccgatcgtgacgtggatgacggagacgggtccgatcccgatgaaacacgcgcaccagaagaggagaggtgagatgtccagatgcggggcgacgacgttggcgacccaatgaggaggaaagggggagatcctgattgtcatcagactttcgtcagtcgtccgaacattgacgtacgtgtctggcgaactgacctcaacacgatcaaaaaggcgaacacgccatcccacgtgacagcctcgcccttgcttgggtcgcccatgatcttggatcgccaagcttccagtcgttgccgatacgacggaatggttagcagaggcgggcctactactgccgaaagggcgtaacaaagcaaagctccaaaggcttcacactgatacaaggtcttgaattcagcttgtgcactcactataccgcaatcaccgcctggtcaactcactagacaactaagtatcaggccataaaacacgccatatgccgctccgaacaagatggaaatgtacatcgatccgggtagcgagaacatttgaacgctgttgaacaccattctataagtcagaggtcgaagctacacacagcagggggctcactataagtaggcggcacagccaactgtcaggatgcggatcggatagttggtcttgtacttctggaacagtgtgctgatagtcaagtgttaccaaatatccgtgacgtaacgaccctccacctaaagctcacttgagtgtctgtagatcctggaacgacctgggtaaacgtaaagccgccttgtccgcgctgttcgtagatagtcctggtcggtattcatcaaacggcgcaagtatcgaggtgcttacggatccatcgccgggagcgcgaaccagccgactccaacaatcaccccggtaaaaaggacaaacatcaagcccaacttccaacccgcttcgaacaggggaccgcggtaccatacgccttctggtgtctcgctatcctgctcgacgagctcttgcacaacatctgaccctgtttcaaactcggtatcgccggaagacttcccattcggttccgtttgattaggagatcgtacggaaggcacttcgaggtcgggcgggcccaacaacctcgtcctttcatcggcgttcaagctgagatcaggaacatattcttgatcaggatgtggatgcgcgctcgaccgatgtgatcttggtgatttgaccgccgttcctgttgatcccgcgacggactctccacccgccgttcgctccccagagagactgcgtttccgtcgagaggaccgtctcgatcctggtgaacgtaacacgatgggctcgacgtcctccatcccaccctcgtcatcttccggatcaagcaccatcaccttgagtctccgatgaggctccttgtcatgctccctcgttcccgctgctctgtcaggatgattgacaggacaatcatcgtctgaactgtcgacctccatcagtcttccttttcccttgctcgattctcctcgtatgccgagctcgcttcggaccacctcgcccacctgtccttcctgtctcaacatcccacgacgggccgttccgagcgggaccttgcttgggctcgaatccctcgaagaaccttcacctccgctccggctctctgggttcaatgcggcctttcgccgacgttcgatcctaccgggcgagggggatggggaatgaggtccatttcctctggagagcgtcgtcggtcccggtccggcttcaggggttcgttgcagcgatgaagacctttgaggacgcttgctacgatcgagatcttcccttccctcgctttcgtcctcttccgtgatactcgcgtgggagtccttggaaccccttcgtttcccgagcaagttcagagaaggcatcctgctcctcgatccgctcgatgatccaccattggcgttaccactgccgactctcccgttcgcgcccacacctacagggcccagcatcgggctaggcagcgtcgtcggtgggaaagagctactccgactgagaaagctcccataaggtgattcgccctcttcgatcgtcctcaacgtcgagctccgcatgtattgaggtctggacaatgctcgcgctcgacccaggccgacgctagacggatcggtggttttgctgcgtgatagtgccagatcttgcgcaggcgacgtggacggatcggaagacgtcccaggggatgaaggttgtagtacgggggacggagttgactcctcgtcttcgggcgagacccacgagagtaggcgattgatatcccaagcgaccatgatgaagggggtcggcgatgtctttgacgggaagtcagtctcgcttagagatcagcgattgaaccgtgatggcggtggtgtcgtgtcgtttgatgatctcaggcgagatctgaaagggatccactcctgatttgtagatgacaggcttaggctcttgtctcgcgctcgctgtgttgccgctctcgaccgaggatcggcgtccgccaaaggaggtggaatcgcttcgtagtagtcgctgctagctgatattcacactccccgtttcctttgaccgaccgatcgttactagactggctattgagtaagtgttgggtgaggtagcgctatgaccgaggctactggacatacacgagttccagtacatgagcgagatgatggaatcgtcgtccacttaggtagctgtacacacactgacctacgctgctgtaccctgctaactgactgtatcgtgcgtgggctcactcttcgccgccggccgggtttgtcaacacgttagcgagcaactcgattgtcggaggcaaattaaagttccggagaatcccgagttcgaagttcgtcgagaggccagtcgtagcttcagctgggaatatttctggtctccgaggagaaggaagggcctgatgattacggttattgatatacagtctgtagcacttgacagagcacgaggtgacatcttcgtggtcgagttgcgattcgaaagctccctcgcctaccgcttgagttccgacatgggatcggccagttttatgtcccattcaatggaccagcagggtacgatcttccgctcaatttcagcgttgaaatgtttgttaattcgccaccaatcgctggtcaagtgactcccctgctatcactcgacttatcgctttcaagctattccttgaaatccttgtcggttcgtgaaatcaccttgaaacgtcctttgttctggtcgacctaaactatcagagaaatcgctcattagctctgatgacaggactgacacttatggcgtgtcaataaaatgacattcgtaatcacaacaccgatgtcaccccgaagttgcttcacggtcaatccgtcgaccttgagttgcttagggaccaaattacccctgtcgatgttctcctagtcggaacgcatatctcaggtctcacacccacacaccgtgtaatcatggacgatgcgcgggatccggctacgtttgctcgtctggtcaatgagcagatcgaaccgctcgccgatatccccgagctccaggtcgactatggtcaattagtagacttgaccgtcaagcagcagtacgaggatctgaggcaattgttccatcggcaagtctcatcatcaccggatcgcttttcaacgcgagtctgctaaacccaagtcttcgtttcgatcaatgatctagcttgaaaacgacgaacattgccgaggatgaccggtcgaggcatgtgatccattatgccatccatgcccgcacagccttgatcaagctattggtgctccttaaatggaaaaaccaagccgacgtcgatcaaattctccccaacggggagaaacaaggacgagtcagcctggcacccgtaagtatttgagctcgatcagtgggaagaatcacggcgctcgcggctgattctgttactctgcttcaggggctggatcaatggcaagatctacagaaccatcacaaccgggaggtccgcaaacaactcgaacaatggtctgaagacgtcaagcggtttcagtgagctgacgaatatagttttatcgaatggcctagtactgagacatcctatccgtcacaggttgcagactccggatcttactaccgccgtcgacctgcttgtaacgggggattttaaatctgggcccaactttctcgacgtgagattttagctgggatcgtctgtcgaaactctgtgactcatgccatgcgccgatttcagtccgattttctgccggcgaaactactcaccgtgcaaggccgaagtgatacgcttcaggcgatgaacgagctgatatcttatcgactccgagtagaagaggagctgccgtcgcggctgcaggtcgtctccattcgtgagttgatgtccttgttgcgcacaatcgatgatattgactgactttccgtgctcatcaggtgacggcaagctttatctcaaagctgaacgactgttcgaatgtgccgtcacgctgggcccattcgatcctcgccaacaatgggttcttgtggatttccgctttctctacgttgccaaacagagcgccaaaggaaagaacggtaagtaacgccaaagtttcgttggggtttccgattcgcaacactgaccggcgacgatctcctttctaatcgctagctcgcccggaccagattcctgaggaagtcaagtcgacgctgtgtgaaacaatggactatgcactccggggcatgtacgaaagtcgactcgctactgaggctagcctgggtccggatgaactattgcccaggtgcaagactttccacaagctgtatgacattctccgtacgtggacaagcggtaacaacggggctctcaggatatctggctgatcttccgctcatgtgaccatagagctactctcactgtctcatcagctcgagattcttcatcggcaagccaaggaactcgaagtctccgaatgggctgggaatcttcgggttcatatggcacccgaccgcaagagtttcagcatgacttattggtcgtgggtcgggttcatcctgtgacgggctttgtcgtctgtcgtattgacttgaaagcaattttcacgcagcaaaccgaccttgcaattcacgaatgctccagctcggtcgtctcagagtcatggacccacccacggtggacagctcgttatcaagattgctaaagtggcgtcacgggaggatgacgctttgtacggtaccatgtcagatacgcaacccgctgtatacgcgcttgaagtcgattggcacccagaacctggctggctaggcgttaatccgggaaccaaaccagtcgtggacgaggatgtctttgaggtcgtaaatcagacaagactgcacaaaagtacagtcacgctgactcgaaatgaccttctcgaatcaggaccctgacgacctggatgtcgaagctatcctgctcgacattgtgacattccacgctgagcaacttaccaacggactcaagaccttcatggacgaaagactggtgtcggcaggaatgttcaacggtgatgacgtctcggttctagtgacgggtgggtactggagtgtgaaagcgcgaaagtgatgatgctgatccggttgagcaactacagagctcggctcgaacgtagtcttgaggatttacgatgaacgttggctgaaattgcagatcaataccattactgggcagctgcatattggagaggccgatgcgacaattgcctcgtctgtcgagatgcgtcttgcgacaagctcccggttggccaacattcataccgataagcttttagatgtcttaatcaacaccaggacaatggtgagccctgatgggaatgattgctgcacagatggcagacctgacgcagcagatgtatttgtcagcttgctcgtgacgccctcgaagaaaagctgcgctgtcttgagttgcatccacttcgtgacttgggcgtgtcaatacaaggtgggtcgaaggaggtgcgctccatatctcatccccttgctaaaagcatcactggaccatcagaactcgacgcccacaaccttgcctctaccggtccaggacaaccgatgaagcccattctacacgcgtccctaccggcagatccaaacaaatctgttctgctcgcactgcatgctaattccctgacggtcgccatcgtccactttgctatgaaaatcacgaacactatactcgtgcctggacaacccgccgtcgaaagacgcacaatatcggacatggaatggctgaacgtggcggaccttcctttgacgcatcatctgtcatcccagtctcgaggaaagaccgtaatgatatatgatcggttgagccggagtcaagtgcaagctcttaggtgagctggtgaaggagcatcagcggctcggaagagctctcaacgataacccgacccgttctccagctttgaactgtctctcgatgacttgcaaagggtctttgcgttttgcaagtaaggaaatcgacttgagactgtcgccccctctgactgatccgtcggtttgtagcgcggtcattacgacccgactcatcgcagcgcagttcaatggcaagggtatatcgcctattcccgaagtcgaggttgcgcctctcaaaatactttcaactgggttcgcattgccgcggggtaccaagcgaaagcttgcaatcgcatcccgagacatctttcccgatcaggatgtgcaagcgatgatcagcgacgtgattcacgtctcggtagagcgagggcataacagtactgtcaggccgagcaaggtgcgcgaatattcagcaggagcgacgttgagcaagatctcattcagaatttcttggtctcgcagatcatagctcgtcttgcattgcgacctaaggctgtcagcgtggcaggaaaggaagctccaggcgaggcattgcccaagagtcatcaggaaagcactagcgatgcaggttggatcgtcaggctcgacacccgaccgacgacagcaagcgtatccatcaaatcagacatttcgcggaattacgtcgaggggttgtctcaagagtttgcccgcgtagggatgttgttgcgattgctagctgaaggtgagataccactggcgtgactgaatgtggttcgaggttgacccgaaattcgaccctgttcgtagcgaatcgagcaactgattcgagcgatccgacagatctcaagatcttgcgttatgacctaaccggagtatggctcgaatatcgtcgtgtgagacgtcctcatatcagctgtcatctccgcattacctgacaaccttcttctctcttagggtcaagctcttctgctagcgacgcctcgccatattcaggaagtatacgtgatcaagcgattgcaggtcgacctggaacaacccctacgggatatgattgtcgatttgctacagacggtactggagcagcaactcggggatggactcggtttgggcggcttttttcaagtgagtgatcatcgatatgcgggacagactgaacagcctggaccgatcctttctgcttgatctcacacagtatgccaaattgattggcccctgccttgaagtcctggttcaggcaagtaaaggcatgtccgcggaagtctcccctgaactcgccgtgtgtacgaaacgccagtgggttttcctttgggaacgagatgatcgcggcaggtatggcgtcgccatctccttcatcttgccgggcgagttcaaggactggaacgggggatatctcatatcggatgcggccaacaagggcggcctgaacgatgtgcgcaattgcgatgcatgggaagagctagtacggagatgcaacaggaaagaagatggtgtcgaggaaccgacgtatgggattgagctggatgacgggcgcgacttagccctgcaagccggtacaggggagcacgtagtcatgggaaggttgttgagcgagctaggtcgggcatagctgaatcgtccaggtgctgacaacggcatgtatttcgccggggggagagatgcatgttgcggattcgttgtcaagcataacggccgtgaagaaggagccgatctcggctacgtctaggtggaaatgaatcagccgagacgagacgatcaccgaactccccaatttccacccgaaagggtctctctcatcgcttcgatcacgttcgccgtctgtctgtctgccgtgttcgcattgaccaactcgcaacgagtctattatatgattgccatttgaaagggaatcggttgagatctttgcaccatttccgaaacagcaataggcggtgaccatgttgctgttccgtctcgccgcgctcttcgggctgacttttaccgtcctggcacgtcccggccgacaacaacccttgactcctgcgccggatgacaatggctcgcctcgtcccttggttgtatggcatggactgggggacaccgccgaaagcgaaggaatggcaacacttaagagggacattgaacgtatgtaccccgggatttttgtcatgagcgtcaaggtccccggcgaaggtagtctcgacgacgaacgaaaggccggattcgtaagtagtcctctttaagctacggtcatgagcacggctcggcttgatcgactcacctttctttttcggaatgtacagtgggggaacgctacggaccaagtcgatcttgtggccgagaagatcatcgccactccagagcttgcgcagggtttcggtaagcactctctctaagcgccgcaaagctgttaactgcactgatatgaaacggttcagatgcaatcgggttcagccagggggggcttttcgtccgggactatgttcaaaggtacaactctccccctgtacacaacttgatcaccgtaagttaggcaatccgtcatttttcgctagagctgttcctcaggtggatcttgcgttcgacatcagtttggctcgcctcacatgggcatcgccgctttgattccttgtaaatcgaacctcgacgtcacctgtcgactagctcaagcggccgccaaacgtggagtatatgggaaatgggcgcaggacaacctaatccaggcaagtcagatttggttcgctccggccaagccatgtactgatcggattgacccactcaggcggcttatttccgggatcaagatcgattggatgagttccttgctgccaatatgtgagtctagcgtcaccgagcaagcgctgcgagcagtcagactgacatcgtgaacccccctcatagttatttgactcgcctcaacggagagacagaggatcagccgatcgctcgggaccatttggctgcgctgaacaggttcgtcatggtcatgtttgacaaagatggtgagtcgtgccgctttcaggatttgtcaattggacagagacctcatgcctgttccatccacggtagagactgtatatcctaaggagtcggccgtctttgggtcgcttgctccaggaacgcatgagcccattcgtatggaggaacacgactttctgtacaaagacgaccacatcggcttgaagtctctcgaggacttgggtcgcacgttggtcgtacagtgtgccggagctcatatggagctcgaatggagtgacgagaatggctgtgccaagcagctcgtcaggaaatttgtcggtcaagaatgataatactccgggtaaaaaaaattatatcgagctagctcgtctggcaattctcgaagcgatcatgagttgttagacaacaagacacatcgaaaatagcgaaaaataggtcgtcaaagccgtaaaatccacgtcgtcgtcatcaaaattgaaactcataattgccttccgccgtcggttgttcccattctcgcgaactagcgacttgagagttcgcagcttccaagaaactggtgttggctgcgccgccccccgcagcaagctcgtaggctgtgtgaggattcctaacttgaaagttgccatcgcgtttctcgtgttgagctggaggcgcgcagagtagtcgttggacaatgtaggacagctcggctccaacgtcgatggcaaggcggatgaacttggctacttccaagtggaaatgcgggtagtaatcgaccgacgctttgcgtacagtctaaggcggtaacacatagttttaacgaggatccatctgcactgccctgctctaagtactcactgccagcgttcggtcaagaccactcgcggccatgtcttggaagaatttccaagcatctcccttcttttctcctgctcgtactgcgggatcctgcaaatcgtgttcgtaaagagctcgtccgagcgcattgagcatttggaagtgcgttgtctagaagaaaccgtttttctcagaagtgaactttgccaccccggcaaactgactaacgagataatccatcgcttcgtattcgacgccgcccgatgctccgctcggtgcttgaggtttgatagtgtttaggtccacttttgctagttcccagaggccgttctcagagtgacacatgaccctggaaatgtattccacgattttcagcttggagcttgacggtgaaggcttgcgttgtgggcttaccagaagtaatctcggcagacatcattgatctcgtctagatattgtttatacaccctgtccttgtgggcttgcttcagaaagtcgtgcacatctagaatcggcgctgggagttctgaagctggacacaggatcctggaaccagaccggtccttcgccggttgctgaaagagactctcgagagccttggtgtgcggctgatgcttcagcagactagcgacatagagactaatgtgcgtatgattctccggtatcactgctccatgcgatgtcgcacttcgcaagctgggtcgtgaagccggccggtttaacatcggtacggattgctctgagaaggagatggtggtgggccggctgcctggtcgagtggcgggagcgggcgtgttgacactatctgggtaaacctggagtaacgactggatgatctcgatgatcagtcgccgtgtggctacttccccgggcttcttcgagctgtaaagaagctctacgagctccctgaacgggctggtaccgaatgctctcatagcgcctcggccgacctatgcatttgtaggtaacatccgatcagcccgtgctactgacgcaattcattgcctcttgcactgacctcagcagtctcgacggctttgatgcatcgtaacagctcggtcaaaagctgatcatcgtgttgttcctctctggatgcaagaaaatcttgtttagcccagactgatgtttccgctctatcacgagacaacttacctccattccacatccagcaagtctttcagtcgtgcgagtatgttaccgtaacccttgtgatacaagaacgcctgtacccatctacgatatctccagttcagcttgatcggggccgctcgagcatggtctacgttgcttactcggtcgtctcgtgtcggagcaacattctcagcctcttgaccctgctcacatccatcttaaacgtatcttcctggccgatccatctggcccaggcctccggaacctctttggaggcgacaccttccacgggcttgggatcaggtttactttccgtccttttcctctcttctagttgcgttccacgagccaggaaagtcgagctcgaagccgtacctccgccagggactttgctggacttgctcttactaaagatgctgcctttgctagagaacgaaccgcttgcaagacttcccgctcgttcccgcatgctcgtcaagtcaaacgaggcacgcttgtccctccttgctgtagacacggattcctcgggtaacgtgtcaccagggagcagaggtggcatcgggagaccgtcggcggtcagtcgtttgtgaccgacaggtttggatgcgttggcacgaatcatgacaaacttgtcgtcgtcgaccgtcatggtagaccgccacgaggggctttcgggtatggcatccgagcctctgatgggggttccaggcgagcctagcgaagaccccgagcgggttttcctcagcattggcgtagacggaggaccttgagaacgagaaggcgatccagggtaaaaggattgggcgcgaagaccttgaagacgtggctgttgagaagaacgcagcatcgactccttgatcggagtgtcgagaggtgtcaacttggctcggacggtttccgacacctggtaatgatcctgcaatacgatctatagatctcagtgccttgttgggagaacacagactagggccctagtaaagactcacaagaagcctttcaaactcgctgttaacgtctgtcctgtctaccttgttcataccccttgccagacctcgcatctgaccgggactgccgggccccggcctgggaggtgtactcatctggtcgaattgcatattctgtcgacttccgctagctggacggaggactgatgctggggattccgagaggactgaatgttgagagcgaccggcggccaaaggaggttgcgagaggtttcgagatgaaccgctggtccggagcgggtgatgttccccgagccgtgacattcaggtcagaagttcgtggaattggggtaatcctcaccctcgagaaccgtgtgctttcggagtgattgggttggcttctggtaagagagactagagactattgaagtcgggatgggaagggggatccgaaagtatatgatcagatcaatcgtaatcaagaggtcgggctgtcggttacgtaaaaacagagctgacctactcccgcgtagaatctaactcaacatcacaatccaggcggccattaacgattcgccacaaagaccttttacttttcgagaggcaattattgaggacattctgtgtcaagactgaacacctctacaaggtgcacatacgtttgagagcttgctgtatatgcaggccgatatgccagctcctgcttaattcgtgcagaaaatcggcatgaatgcctcgagggcgcgctgaaacagactcgactcaagcatcgatccgcgttcaatgcaacgttctctggtgtaccgatacatatccctggtgaaccagatgtattctgaaccgtgcggagaagatatccaatgggacgggctttatgcatcatgctgacgatgcttgcgaaggctgatccgcgagttggtcgacaatatgcggatggggatagttgcttcgcgttcgtttcactagcttgtttgcgcaacgactgcaacaacctcaaagagactcgttcgtcctcgacaaccttccctctcgtaggagttctttggcacactcgacgaagcataaaccacctttttcccctccagatccacgtcgtcacgaataggcatcacatacaatgcaaagtaaacatcccaaatcatcgatgatcttcaaggctgaattgaacgttacctatcgtgctaaacctatctaacagcttacttcctgctggtgtccagctcgttgctgaccccatcagatgcacgaacgcattcggttttctgtaggtggctttacatctgaaggtacgacctcttcaacctgcggttcgtcaggctgtcaacactatcagagcctaccatttgatcctcaacgtccaacgtgcctccttcccttcctccataggtcatgaactgttcggcaccctcggatcctttcagcccgccgccagttgcatctgctcgaccggccctgagcagatccgaaactcgcatccagccggatcacgtgacctagatctgacaatccccccgaaaccctttcaccctatcatcaccgagtcattctggagcacatcctgcctcgtcttgatcatcaacgtttgtgcacatgtcatcttcttgatacaatggtatgttgagccgtctaaagtgcgaacacccggaatatagttttatcaatgcgatacaagcggtaactctgtggcctttactcatgcggcctttgattccagactcttgatatgggcctgccatcgttccttttctccagtctccatgaaagcactggccatcctggtgaaactcgtgtcctttctccagacctgcaacggatccaggtcacgaaggtatcccttcatctgcgactcccagagatggtaggcgagttgtcccgagctgaaaaagtcgtattcgttaccgtggtagacggcggcgatatggtcatctgaccaggtgggccagaaaaaggtacgatcggagagcacggtgacttcggtcggaaagatctgagcgagatgccaagggactttctgtacgagccgataagcgagcaagccccttgatttagctcgtccccatcgattcgtctgcgagacccgcgtgctcaccaccgaatgatccgcccagacgtcctggtcgaaccagtcgtacgaatcgatccacttttgcaagaacgagctatcgttcctggctacgatgatggcgttgcataaacccttgggccgcatctcgtcgtcgtcgtacccatattcccaatcggtcggctcggcttccatccctaggaccaggtcctgggcgagcaggccgttatcggaaaaggaatccaggacaaaggtatcgatgtcgaggtagatcccgccatgctcgcgtagactgcgaatcagaagccagagcttgtttgtcagggggcatgtcgcctgacgacttgaacttgtgacgacctacgcttctagtctcaggatatccgccttgtgagcaaactagaacagaccaggggtagacggtcggatcagctccatttcgacccaattgacgtgatcccgaccacccgactcacgctcgacaccggtctcttgtccttgccgacccacgtcggatccctcgtcttgacgacctctaccaaccgcgcgactccatctcgaccactttgcacctgtccgtcccttctccactccttgatccgatcccaccaatacccccgaggttcctttaagcagtgaaacaagatcctctcaggcccgagggacagcatggccgacctcatgcccagatacgcatagtaagggaaatcctcgtcttccttggtatcgaggccgtagacgtagtggacgatgttggggacatcttcccgagcgtgtggaaggaaggggaagacgggatcgatcggctgggcgggcccggtcagtcgggaagggaggaaggagatgggtcgatcggcgggtcgtcggctgtagatacttatccatgtagggtaatgcgtgccgatgacgatcccggcgaggaagatgagggcgacgatgattcccttgaggagcggtggtaatgcctgtcgcacgacgctctgtacgggacaggtccagtttgaaaacaagctgttagtctcgtcatctagctgatatacagacctctcgactcgcgtcgactcactcgtccatattccgccggggtggacgttcgtcgtaaggcgatgtaaccgttctctgtgtcttcttcaaagcaccggctggcgctccaaggtgccatctgccaatggcgcactggtggtcccaccggatgtgcgtgctatgtcgacgatggcaacctaggtatggattgctctaccaaggtcgaggagtgcgagtcctggtggtcgatatcgggctgaatgcagagacctccaaggatgctcgctgaactcgtcgcagctaggacccgatttatatgctatagactggtcgcttggattcggtcggccaagctgatcggcttcgggtttgagcgacccggcaagaagaggtcgataccggctcgatggtaccaggtgagtgttagggaatacgtttggtgacgagatcgcgagatgagctgagtcgtagtgcgggcgggcacgtctcggtaccgtcggtttggatcgtctcggtctggcttcgtcggtctggccgaaagtacgaatgcttggcggtgtggtgcaagcgggaggcttccgttattgtctcgagacttttgggaagtagacccggcagagtggtcgtcttctttcgctcctcgcttttcctgattggagtgtatctgatgggtttggtggtacggtacgttgatgtacctctgatggtttgaaactacataatgatggtggtgatcactttgaacctggaaagatgggcactatctgagaggaagggtaatatgagggggaataacgaaataaagtcccttcctccttccctccattcctttgagacacaaagccaaaagattcgatcctcacccccgcgtcattacgaaacgcgatcgccgcagcaagcacagcatagtcttcacgcctaccccatggatcctcacctgcacatacctttccccacatacataccatcccattcatagttcgtgcctgccgaaagccataccgctcgcccagcacggacctcctccagcctctcgagtgtagcggtgaatttcctccttgcccttcgtacaattcgaacttatcgagctcgacgtgaatcgacacagccaagcagggccaagctcgcgcgctaatagggaagcggcagcagcgctcgcccgaagcccgagcctttttaggtcgacgtcaacaaattccagccggcccatcacttcgtcattcgcagccgtggcgtcgagcgcgacgacggcggcggcggcatcgtcgaaccgaatttcacaggcagaccgtgcgtgaatcctcagtcgtatatcgccgcgcctaaaatgacctcgtgtcgggctgtctcatctcgatcaagttgccgaacggttcacgaggtattcaacatctactcgcgcctaggagtatggaacgagagctttcgagatgatcagctgattccccgaactcggccgtgtccgtgtcagagctcaacgagaacatgcggcatgactcatgccggaccgcacggctggtcccattctgcatacaacgtcttgcgtggtacaaccctccaaccgcctggcggcgtatacaacttgcggggcaggggcattgcggacagagtcggtcacatctcccaagcggcgctccgtgcggctccgcaatatcaccgtgtgaacagatgtcgaccctcgtccacccgactcgaacctgtaataagcatgaacccggccgtatcaaccaccccgttgacgaaagtgacacgctcgagttttgtttccggtgtgactcactctgcaacctctccaaatcgttctccacagtcaacctccgcccctttctcgcgctcgcgttgcttttcatcccctcgtgcatagggatcggacgtggggaataaccccagtacgacgccggagatccgggggacatcaagctcgacgaattggcccctttcttttccctgggggtcggggtcgaaggcgcgtgatccaggttggatcggatcgaacgggaaggggtgaggaccggatgagcagcgggagtggtaggaccaacggagactggaggtgaaaccacgggaacgggcgacctggtttgttccccgagcatcccatctgtcaacgcctggatccgcctgttctggtccagtaccctctgtcgaccggatgtactggtcagcgaagcgctagaagacacgcacttgtgaaaggcgacgcacctcttgccaatcttccaccttgatcaataattcgctctgtaccgtcatcaatccctcgataatcttgttcagcttgtcaatttcctcagcttctcgggtcttctgcgctctggccgaaggcgtgtaagtttcgaccttggtatccatcgaggctaggcgctgttccttgagcgatccggcatggcgaaggattggctgtttccccgccgtcggactctgctcggccgagacgttcgccggcggtcgagggagccccagctcgttcaacttgatcactctttcgttgacgcgctgcgtctcggctcgagacgcagatacctcttgttcaagcctagcaatatgctcggccatctcacttatcgtccgttccttctcagctcccgcctgtcgctccagggcgagctcttcctcacggtccatcctgatggacaactcccgctcgtacttgcattcagcatttgtaacatcctgtgcgagttcttgcgtcacttccagctccaacccagtcctggtcatgcccgatgcgatctcattgacctgattgctattgtttcgtcgatgataccggacgacactggcgacgtccgcggcggtgaaactcgccgccggtacttcggcgtccatcgagtcctcgaccagcctagctatactgctgctcaccgctcggcggctgttcttcgagggtgtcacacaggtcgtgaacctgctcggagacgccgatattgcggggtgatcgctgacacgtctgcgtagccgtcgggcgatactgccaccagagtcggatgcgatgaaaccgtttggtcggccagaaaggatttgcccgttaagcatagcgagggacatttgtaatcgagaacgacgagcttccatctcttgtatcgtcagtgccagctacatcgtcaatcgggatcgcggtcaaccgacatgcaaaccgcgtgaatctcgctccacctgctcacctcggctcgagtgtctacctcgtcaatgtcagaaacgctgggcggtcgctgtcgtgccatctcatccaattgcgagcgcaatgccgcgatttcctcctctttcgcaagcagcattgccttttccgatgatgccatctgtcaagagcaaatcgcggtcagccctgctcacagtacgaccaactcgaagccaagactcacaatgatcccctggacggcttttgtctgcacctgagcgcagcgagaagcaaacttgagcgtctccaaggtctctgcctggtgtcgttcttccaaggagagcgtgcagatgacggcgatattggcattgccccccaacgcgttctcaagcaagtgcgtcaacttgctgttcctgtacgggatatgcccgccactatggcaccgacagacacacatgttgagccatggggaacatcaagctctggagcgcgtagacttacggctttcgagacgcgtccgatagcgcttcgattacggttcccaatgccaacaggcttcgattgatgtatttgccctcggccatccgttccatatccgagactgccttttcacttcccgccaggtcgatcagggtctacagtcgcgctatcagcaccagatacgatcgtcgttggatccctttcaaacttaccaacttggaccgccgcacatccgctccttctcgactctcgaccgtctaacaacccaggcgatgtgtcgattagctattgtctcgactatgcaacattcaacgtcgtatgggctcaaaccggaactcacgagcgtaaaaacacaatgcgatctcgaactcctctcgttccaatccgtcgctcccgtctttcgattattcgctcctctctgaagcagttccaggatctcttctggactcttgacgatctcctcgactagtggtctgacttgaaccagaccctaggtgtcgaaacgaacaagcccgtgagaacgggtctgaccgagctagagctgacgagcgcgggggactgaccttttccacgtgaatgttgggtcgttcggattccgggacgacctttttatgcgagaccagcaagtccctgatgctctcgttgtaaatcttatggaaaagagctcaaagcggtcggtcagacgggtcacgccaggagggacactgtccgggctagatgcacgctcacctcgaggtacgacaccctgagaagataatgcctattggaatcctgctcaacgccaggaccaggttagtcccatcgtacgggatgcttgtcaggctaggaccaacagactaacctcttcgatcgtttgaaagacgctgctaatcgccagagggatcaccccgatgtcgtcccgcgtcccgctcatcgtatgcgtctttcctgttcgaccccgcgtgtatcgtctggggaatcagtacgggttcgtcgagaaccggaagacgagcttctcatgggcccggcccttggggagttgacatacctgagcctgtctggccgtaagcgaatatcgtcgaattgaaacctcccatgcatttgacgaccagcggggcgatattctcctcgtacaacgacattgtctgtgccgggggcaagtgcagcgcgtctatctcgtccccacccggagtcgatgcaggtcgatgcggatgagatcagctggcaatgacttggcaacagagactggatgatcgacgaggacttgccgaatgaataggtatactcccccgcccgacccgactttcgacctcgtttcatcaccctcgaatgcgtatccgagaggctgagagtgtggaactcggggtccaggtcgtaagcctccaagcactccggagaagataccggtcgagctctacccgggattaaaagttcgtggttagccatcacgactgccagctgtacccaaaggtaggatgaacagctcaagaggcagaagtgttcagactcacttgacgcagactatcaccttgtctttactagccacctgctctttgggcgttttgagagccgaaacgagttggattggagaattgagccccatctggacgacagacttgaccccgaagatgtctcctttgatcggggttgccatgggtctcgagctgcgtgcctttgtcggggtctgcatgacagggcgagcggcaggcggaggacgtgttcgagaccagggcgtttctaccgggttccgcagtgtacgttgggatgataggtttcagtggttccaggatactctataattgactattggtcgagtataactccaatcgatatgtcgttctgatggggtcgattctgatcatgatcatagctatttgctcgattgttgtgattttggttgattcacattctacccctttgcagtagtatgatgatcagcgatgagggtatcttttatcaaaatgatcgatagaatatagaatgtttctcggctcgagaatctgaatgacgtgtattcttgtaaatctcagacccatgacgtagctgaagatcatttgtttagctcccgtttgggaacgagagatgagatgtgaaaaattacatccgaagaatcccccttcctcttcctcttctgccttgcctgagtgctcgcgctactcgatcagctgtcatcttctcatcctattgcctctctctcatccgcagcgacacaaaaccgtctgacaatcatcatcccaggcttccacaagaggatttacactcacagcaaaagtcatccttcttcccagtacatagcgatattgcaacaactcaccgcctcgtcaactctaatccagtcgcaatcgcaaattagcaacctctgctccctaccccgtacccagctcgtaagcctatatcagctcgactcccgaggatgacccaaaggagcccgctcacctccagccttctcgttgactctaaattagaattcactcaagtcaatataatcgcccaccatgcctgtctctatggtccaccgcaaccgatcgttcaacatcatccccggtgtaagcccacctgtcgactcgccgactagatcgaggtcgaggttgctgattacggacgttgatctgcatgtgatcatcaggtatgcagggtcgaccgattcagtaagctcgacttgcctccaattagcttgcgcttgagcttctccggctgatcatctcgttacctcgctcttgttttgcttgcttgcttgcttgcacgagcagacggtaaattctcagtcgtcttcttcggcaagctccgatggacaaagtagagcttcccggtctctgattctcgtacccggaacggctctcagcctggcttcgtgagttcgatcgctcatcccttgggaaacacgaccctacacgacacgtcttgctcatacgtccacatctgccttcctccacctcttttcggcaccgaaaagcgtgatgctcccagtctttctcttccctgtttacgtcgacgatatacacgaacacgccgcctgctcttcccgccttatcggtctcggggcttcgacatgagcccataaattaattctcggatcttatcgccttcaatcgagctcgcgcctttactaggcgacacccggtctcgtcaccctttgccctagcggagaccgagacgtgggaatctcaaacgtatatgttgggatcgcctagtccgcctgggcccgggctcgggttcggggttgtcgatttgcctcgtttgacgatcgtctagatcatgctcaatatactatacccatctggactgctcgttcgtcgttcgctgtgctttcggtccgaccagagatgcgggttcagggtctcgaaaggctaaaggcggtgatgaacgaaggtagttgcatcaaagctcacggttgtgacactggagcagaatcatcattttccagatcacgaacgcagtcatcaccccgtatgtatcaggctcgcagcgcacattggaacctgtcggcgtatcttatgactggatagagggtttttttggccaggggatattcccaccagaaagggcttcgccacaggtcttgtaaaggctctctgtgccgatccagatctcataaaacatccccactgtcaacgtcctcaggtcggtaacacgatattcactcgggtccaaacaaaaagtatagcccggtaatggcgatgcgagccttccgggacgaccggctgtgaggaaaacgaacatttgccgcctgcctcgcggggctgtcgaatagatcttgattgacacctctctgcccgtagagcgagtcaataaccatctgccaggaaacaaccccgtgcgagtaataaccccgtgcgaggtatacccccaggtatggcagacaacgaggacatggtgtagggcagtcggtggaccggtgggtttgacaaccatgagcagcgctggctttccagcgatctccccccaaagtcgatctttgacgtttggaacctccagatcgtggtggtcggtaatccagatcgatgctacgcttgtgtcatcatgtcccgttccctgatgtacacggatgttgattattgtttgcaggaagtagccgagagcaacgtctaaccaatggtctgataggccgcaacatgaaacgctgtgcggatctgatcaaaccgacccgttccccttctgcaaaaaaaaaactcatccagtgcgccgtccgaccaaacgcatcaggatctacggagaacccgaccgagatataaatataaatgataacacatcgtcgacctgcagagaaaaagatccgtacgatcacatgtcatgcgacggcgagacgcaagaaggagaaaaggacggtatagataaaagtccaaacgagcgttctatgtaatcaggggacagccgaggtgcgcagacggggggttcggtgtgagatccaaggagtgttccgggttgtaggatcgatgacgggtcaaggaaagtcgatcgagaccagagggggcctactcgatcccaccgagtacacgtgggtgtggagcgattgagaattggcgttgtccgtggatattgatgatggtagttgatgatgataattcgtgttgatcacgacgatgatgatgatgatgttggtgatgtacacgtgcgtacgtgttccaaggcggagatgatcgattccctgccctaccagacggtgaagaagagtttatacgaccgggccttgatcccgcccggcaagtcatccgaggaggcgatcgatcgtcaccccaacctccgccccgaccgttcgatccttgtacccccgccccttcctccccttgcttcccgactgccaacccctcttcccttcctgtcgaggcgtccgacaacccctcgtttaccacacagcgaccccgaacgcgcctgccaacacgccaacgacgaccccgacggcctgaccccacccgacctgtttccccggcgaggcggcattcgacccacctccgttcatggccgggttggtacctccggtctgagcggcctggttgacggattgctggtattcgctgtagtccatgatggtacccgcggggacggtcctcacttcgcccgagggaagggtgttggtgctagaagccagcggggacgagcggaggagtcaacaagaggcgtaggacatggagagagagggaggggggtactcacgcaacgatggccaagctggtcgtcgtcctcctcctcgaagtcgttgtcgtctcgtcatctagaggatccgtagtgacccttgccggggtagtcgtcgtaggtctggtggttgcgaccagtggggtggtcgtagggacgagcggggtggtcgtagggacgagcggggtggtggtcgcgaccagtggggtggtcgtaggtcggagagcgccggtagtgataggtgcgacggtagacaaggtctcgatggcgagggtcacaccggcggcgttggtggattgggagacgacgatcgtgtcaccatcctagtatcacagggagagacgtcgggttagccccggaacatgggaatggcatttattacgacgacgggcgggactcacgatccactgatcaatccgacgaagagagaccacagaggcaacaagcgggagagtcgtcgatcagcacacgcaattcatatgcaacatccatcgacccagggggtcttcaacgtcgtactcacgggcaaagtggtcgtatacacctgagctccgacgtgaatcgagttgacgagcaaggtcaacagggtgaagaggaggaccatgggatttctcgaggaggacgtcatgatgggcgaatagacagtactcgagtcgggaatgaaatatgaatctggtctgggctagacaggcgagtatcggttctcggttgtttttcgtgtttgttttcgattctagtgcgagtagcgagtagataggccggtgggtggagggttcgttcgttcggtcgggtcgacacagagacagagtatacaggtgaattgagagtagaagggtttatcgtttgagcggcaagtaggtgtctagatggcgagagagagagatgattcttggggagggtaggggtgatgatgatggtaggtgggttgatgggaatcctgggtttagcagcaaagtgatcagaagagtgagagtgagagagagagagagaaagaggcaaaacggtgcaaggggcagggggccccggttgcgtgcccctctttgccctgtctgcccccggtctgttcgctcgttggctggcgtttgttggcttggaaaaggaaaagagagagagagagagagagatgagagagcggggcagcgcgggagggaacagaaacgacccagagctaaggcaaagcgtgagcaaggcggcgcagcgtgagggccagctcgtccagcagggcagccactcgcgcgcggctagggatttgccttgtattacggcctcgaggcgggagcggggcggaagacaaaggctgccacgaagcggcaagattgtcaaagcctaacgccaccccctggatcgaaccctctcctcttcacgccatctgaactgaatcatggttgccgcccgttctcacgcgttcgcctccgccaaagtgccagtcttggtcaacgagcgctaactacgattcaggggggccgggcaagatcgaaaaggtcgtagggacaatccttcgcgatctgccgaggcccggtcttcggcgtttcactctgagcgaacttgacctcgttctagcgatctagcgatcgtacaaccctctcatcgcccataccactcgggactgttcgagaatgtttaacaaggccagtcctcttggaccgcctcaaagcggataagtgctcttcattgagcaggcctcccgaagattacactcctgtctatgaaaacggttttgatccagctcaatttgccaacagatggatgcaggcagcttctagcaggtgtggtttcttgattgtgtcggctgtttttgatccctgttagcgctgagccgtggggtctttgcctgtgcattgaacttcgcgcgacatcctcagcacttcacctacatcagtgtttcgtgcgaggctcgtggcgcgtgcttgagcggatctgaaaagccagtcgaatttgtgtctcccaagtgctgccacgaagatgctgttggtcaggaagtctgagcagacagacagcggacgatcagctactttgagtgcctcttcaatgaatattcatcgtggaaagatgtccgtctgcgaagcgagcctggatttggcttggatttgacattgaaaatagaaacctactcgaccgataggcatcttcgaccgatgtggaaagcaagtcgacgggcttttgtcggttggtaaaagtcaaagatattcggttcgccctcgataccggcatccctgtcttttcatcgctggaggtagataatcgtgatctattcagctttcccataagggattgttgtcgttgggcaagtcgcttccggtaccagcgacgggaactcgaagcctgacgtcggttgcggcgttttccgacaatccgacgcagatccgtctgttggatccttgacttcgagtcgaaagggccatagtataagatgagaacaccccatctcttcttcacgttgtagacgacggttccttttccttttcaaattcgccggcgcatccgaaaatacgatataccggtgaagctcgcacctcaatatatcacgaaatctctgctctaccggagcatgtgagaacagtcgtcaactaggaagctcgagttatggacacttaaactcgcacagatcttgtccgattgtacttaaagctactcggaaggcaagcgcgatgcgtgagcacctctgcccgcccaaagccctccagatcacaaactcagaacactgcatcgcatcatggttcggtcgagaaatacgagccaattttcacccgatcgcagcattttgaccttgctcttgagcacttctgttttgggtttttagacatgcaaaactttcgaaacctagtcacggaccccgatggttcggaagtatatagctcccatatgcatccggtcgcccccgatgcaggaacttcgaaagaagtcatccgattcagcttgttcctcatacaatgaacctggctcgccctggcctgccgattgatccatagtgcagatcctccgcgcccggctgaatcccgaaccgtggtagagagtaacatcgctttccgatcggcgggtccatatggcacgatggtcgtctcttccagatgacgttcttggaatcgtttatgacgacttggccgtcgaggatgtcatcaagttgactcaattatcgaaggtcgatgcaagccgggtgagcgtgcatcagcgagggcatttctcgaatccagcgatcactcagcctgacagactgtttccgtatcttcaggtacacagcttggccttgccgtccctgcttcgacgaacggcctgccaccacgtaacggtcgatcctcgagagcgagctcgttcgaacttgaaagccgtcaacgaaaatcacaacgacgtgatacaaacgaccagagtcatccggcacaatcgaaatatcgaggacaactttggacgcaaaaggttcctagctcggcagatcgggaccacgtggcataaaccatgtcgcccttctattcagctcgaatctgaccgtcttcttgtcgccactggtccgtcattgacggtgcacgatctatcggctgtcgatggacgtggaagcgtacatgatggtcgaaagggggtcgtcaggatcgaaacagtccttgtgcctttggtcagagatcgtaatcgagttgtcaactctgaagcacctcaagaaggctttggccggttcactcagcgacccgccgtggcatcgcccttggacgatatcacaggcttgatccctctaggctccgacaactacatcatttccacggttggtggcaggttgcaacggatctcgctgaaaacggcggactattcgaacacaggtcgcctgcatgcagtctctacagctttatacccgcataaggtcaacgtaccaatagagtccctctcagcttccaccagtagcgactctggcctgcagaaaacaaagttcttgacagcggcgcacgatggacaagtgtctctatacgatgcgtcatccccttggtgcacgccggctactttcaacgtcggctctcgaccatggtcatcacacatgtcgctattgagctcgcaaccgtatttggcgatcgggtcttcgggtcttgaacctcttcgcgtttatccgataggtgaaggcgggatccttgacccaggaaatggtcgatacgcaagaccaggctcgagtccgtccaaaacgctgctcggcgcgcatgtcaaatctgcggtgtatgacattgtttcgcctccaccggatatggccaatccgttcagcaacaatcccacttcgattctcatgtcggcatggttcgatggcagagcgcgaattcacgacctgagagtttctgggactggatccctctcatctagtagtagtatcgatgatacggcaaacggaaggacacgacctgtcatggaaatgtttgacccatggtcacaatcctcgctatactcgtgtgcctggacggggctcgggaacatcgcaaccgggtcatctcgccatggtatggtatctctcttcgatactaggatgctgatccgatctaggcatagtctgtcttcgcataaagccgagagtacaattcgagccttgaacgaaccactactggaggattcgtcgtcgaccaacgtagatatgctcaaatggcatcgcggcggttactctgtttatacaccaggtcgacccgaaagccctgtttacggattatgtggagaaggaggcaggatctggggtgtgacggatcgtcgagcctttgtgctagcattcgacatcgagggagaccagcccaatctcgcagagtcgcgaggttggaatatcgttggcgacggatgccgagctggtcccgttcacgcgacctggccaaagagggctggtgggtgttacgctggaggtgatgcgctggaggaggtcaaagattacgccgctggatacgccatggacgatcggcatttacgtttgttcgagagtctgcgaggtggagattgaagcaggctgcaagcacctaattctactacctaccaccacttgtactctacctctcgtaatcgacttgtcgatgattgctatcgcgtggaacctcacggcaagatgagtcatcattcggccgcgccggcgatcccgagcccgtggtgacgccattttctctctccggtaacatgcgacgccgggggacgagcaagttgttccgaagcaaccggctctgacgaatctttaaaccctgatcgaattgcttgattcggagagaggcagagaggggagtccttagctttgggatggttgacagagcttcgacttttaaaggtaccggctgttaggagaaggctgagacacatgggtactcagatactggggttggatgtggatgggtgaccgatggaggtgacggtcgatggaaagaaggcttcagaccttgacgttcgatgtgctgaccaaggccggtcgcagactgctgcagtgtgatcttgcttccggctacctcgctcgctgaccgctcattagatttcaaggatggatatatatatatacctttgatcgtctcgtccgaaacggcagcgtcttttcaggtcacttactaccttaaccaaacgtcacacaggaaggcaaaattcattgcatcaaagcggcttagatctaccatattcatcgaatcgaaatatactttcggtgtcaatcgacgatgctgatctctgcgggcgttctcagcctggtcttaccgctggcggctgcgacttttgaaggacaagtccatcagcttcatgctcgacaggctgtcccttccccatcagctggaagtaacagcactgccaatattaccatcaccccgactcaagctgtactctcggctaatggtgtcaacgttacggttcaaggtgagtgacacgttcaggtccttcctactccagatggctcacccggaagacttcgcaggtgccaccattgacaacctcaacgtaacccgttacttgggaatccctttcgcccagccgcctgttggtgatctcaggttttcgcctcctcaggcgatcacatacaatgcgtccaccacgatcaacgccaccgtcatcggtcccgcttgtcctcaacctccttccactcgctatggaaacacctcagaagattgtcttcacttgaacgtgtacagtccttcagctcgagctctgaccacgctgaaccagaccgcaacgatcttggcgggcaacaattccaacctgaccagcgcttatgctcaaggtctgcccgttatggtatggatttacggaggtatgcataaaccccattatctgcttgtaccaatgccggctgacgagctcactaccacgcaggcgggtttacctccggttctacgttgccatacgacggatcggctgtcgtcgctcagtctatcgcatcgtactcccctgtgatcctggtcaccctgaactacagggtgggaccttggggttggcttggaggggagcaagccgcagctgccggagctagcatggttggcctgcaagatcagctgctcgctctaaagtgggtcagacaaaacattcagagctttggaggtgatcccgagaaggtcactgtgttcggcgaaagcgccggtgcgatttccatcggcttgcatctcatcaatcccgaattggtggccgcgagcaactcttctgcgttgaatgacaccatgacgcaggacaactcgactgcgtcggcgatcaattctacgggaccccagccggtctctatcgatacccccttgttccgcggtgccatcctgcagtctggctccccttcgagctatcctttaagtgcttccaacattagccgccaagctttctacgacggtgttgctttcctcgccggctgtggcaactcgacagaaggctcatttgaatgcttgaagcaagttgatcaaagcatcctgctcaacgcctccaacaccgttctggctcaaaaccccttcgcgtgagtccgcatctcgatattgacgatgggtagcgtgattctgacagacgtatcctcttcaatgaaaattcagtgtcgcttatggtaaatatgtctgccgagtccccctgataagcagatgctgatttgcggaagctttcgctacacagggccttcgatcgatggacgcctcgtcacgggaagtccaactgaattgattgcagaaggcgcgtatgtcaaggttccaacggtcgcaggcgatgttttggacgagtaagcgtgatttgccgtccggtcatcgcgttctgatgctgatcagacatcctgcagaggtaccatcttcgtttccccgaccgtttcgaatgagacggccttccaagcatttgtcgaaggggcctttgcaagttcggcttccctcgttgtcaaccagaccgtattggacggcatcactgagttttacaccaatggtaccggatctcccttccatgcgcctgccaacgagacgttcggacgaagcccgtagtaagtgaaactcaaccgctcaaacggacgccgttcgctaatggtatcattgcagctacaagtatctcgcagctgctttcggcgacgtaatcttccaggcgccaaggcgatacctccaatctcagatcgttgagcaaaacggtactacgtggagctacttgttcactcagaatttgaacgctagctctcccacaggaggtgagtttggaccgcctcgagccatcgtgattcgcatcagctgaagtgcctatgcttagtggcccatgggagcgatgtgccttatacgtttggcgcgcccagcatctcgcctagcacatatggcgctcctgcagttcaattctcgaggcagatgatcgcttactggtgagatcagatgctgttgaaaatgacggcctctcagatcactgatcaagtcatgtttaggatcaactttgccacggtactgaacccaaacggcaatccggcttcccccgtcagccagatcgtcaaacgtagcctcaatctcactgattggcctgaatacggagtgaacggtaccgtcgatatgctgcaactcgaagcgagcaatctgactatcgttcaggacaactatcgagaggaagcaatctcgtatattctttccatttccgatgccatcggacaataggtccggaatagattcatacaggggcgtgatctcgtcaggactttggcgcgatttgctctcctgtggcgagcgatattcagcgtgtaaaggatcatttacctgtgctcgaaatgtcataatatgctatatgccacaaacagctgcgcgattcgacctgttcgtcgggccattctcggtggccattccggaacatcggcgttgctttgagtggagttccgattacgcagcgaaatttctgggtccgacggagaccaaatgcgagctagaaagaatcaaagagacgtgtgatccgagtcgatgacgagcgcaaccatcaagaaatcggtccgttgccgccgggcgggaagctgatcgatgacttggctccgaccgatttccgtgagacgcaggtgcctttgtttcgcattcagacctatgcggatctcgacgtccaaaggtctactcccgttttgaaacggggagttagtaggtgtcgctggatcccgataagggggagatacggtccgggccggggttgatgatccggtttcatagagaattaatctgatgtagcgagcctcggaggattcaaaggggcaaaacacggagcgtgtgatggcgtgatggggcgatgtttatgtgtgtgcaagtgtttgcgatctcccccgatgcgcatgggttgcatgcatagatctgtttcggaacgatgggatccggctattccccgcctcttccgcgcggtctctgtgtctgctgtgatcgatccacccgacttttgggatcatcaaaggggggaaccgtaatcgtcagccattcagccaagaccgactcgacctcggcccggtcccgcctattcaaaactatcatcatctagccttcgatagcagcagtaacaggtctcgaggtcgttcgcgaatcatctctatcgatcgatgctagcagggcttaccgtagctcgacactatcgctcctatctatcatcttaacaacaatacgagcaaggacctgtggcccgcacccgccccgctttctaccccgcgatcgcgttcgtcacgctcgacatttatcgtctatcgcctcgagatcaccgcccgttcacgacttgcctggacaatttctatccatcgggaaactgttcccatccattgtaccccattcatatttcctttccggttcgctattcgatccgaggatatcagtagcggctacctggactttgtcacaccgagttcaccgggaaactctgggttcattcatacaattccgatcgccatctggtggaccttctggacatcactcgaaactcccgatcgcttgcctgaaatggacgttgaagatctcatagcatcgatgcatgtgggaaaggagggttatgagctcaaggctcttcaggtaggtataatgtcggggctttgtcaacgaagtgatagcaagactcacccgtcgcgtttctctctacacctttactaacaggcccacctctccaaaacgctcaattataatcctgagaccactacatatcaaccggtacaaggcgtacattacatccctcctcctcctgtatcctcactcaattcaatggcctcgacctcgtacggtacatcatatcaccagtacccgacccaccctaatctggctatcaatcaaggtcgagcggtcaggcctcaatgtacgccgatgcatagctttcgcggattccagccggtcatggcagaggaaggggaagaggaagaggagaatgcgatggacacggagatggacggtgtcgaggagacaaaccgctcacacagaaatcaaggcaataatggcttggcacaacaccttgatcatcatcgcctgccttctccacgaaacaaccacgacgagggagattttgcggcattctcatccgacgcattcgctcctatctatgcgaatgatccaagctctccaaaatttagcaacggtaaatcgccggatcgatggagtgccttcaaggttcatcctcacgaccaagggggcgattcgcaagccaacaaaacacaagccttccggggcctttccacatcaccgacctggacactagatagtcatggcagggatcgtgctacgccagtgcacggtcacttcggcgtgccgcctccaccggaggatgagccaatagattcagctggagactggtctgggggaaggctacgcaataccaacgctagggagcagcgcaagctgcacggagatacactcggtcgacgaaagtaaccacctctttgagtcgcgttgtgcgttccagctcgatcgaagccttgcatgttgttccagttgtacatttcgtgaaggttgtaccacgtacccattcatcacaatcacgggtcagtgtacagtcctaatgcaacgtgttcatttcgagtcgaatcaagggtcgcgaaaacgtcgggtctcaacgcagattgtacgacacagatgacatcggcgatcgtgaatcatatatctcttgatacaataatgaactattgaagagagttctctaggttcatcactcgattactcaaccagtcgtacttagccgaggagccaacaatagtcccgcttaagcctcggcggtgacctggagctgtattcgatatgtgaaggtcagacaccctgaagaagagatagccaactgtagaaatacttacgaggtcagagtcaccggcgtcgacgatgctcataacaccaactcggtagagctttccggcagcagttccgagctcaacgttggaaccctggtagtggtgcacagaagtcttggagctatcatgccaaatacatgtaagcgaatgctagaagactaatactcgatgtgtgttgaaccgaaacgtacagcatggcgtagtactcgatctcggactttcgcaaaggagggcagttttgcgaaataaggatcaacttggctgttgaataaccgccgtacggccagaccagggtcagcatggggaccttctcagccattgctccagtcccccttcatcccgcatgtatatgcagatgataaaggcttcgcagcgaaacattaaaaatagagagacgctcaccctttccgttacggaggttcttgagagcctgcttgtaaccgagagtgtactaaataatgacaaacgcacgatgagcatgtgccttgggcaattcgtgagactatgagaggaaccgacctttccactcttgacaacgagctgcaacttggagttgatagactcggaggtcttggcagccttggacttcttgacgggggccatttttgtggatgaactacgtttcttttcttgaggggtcggaaagaatggctgaatcgaatcgaacaagacgagcaggtctttgattgatctcaagattggcagagcctgcaatcaatttgcagtgtctatcgctaggtcaggccaaggtcgcgcgagaaggaaaatccattcaagtgaaaacgcgccaaacagaagcgcagatgtcgcgcccggttctctctcgagatgattctcacgcgtggaattcacgtacaagccaaagccacaatgccgtacaacacagacacaccgtagaattcgcaggttacagctttgctttgggtttcgtcgaggccaaccagccgaactcgagcctgtgtggcatcgtatatcaatgcctcaatccgtgtatttccgagccacgctcactcactttttcttgctgccactatccatcagcacattgatgagcgtcacttgtccgtccttttgcctggcaattccctctacgaccgcagtttgaagctcatcgatcgtccgcacgcagtggcccaaaccgccaagggagctgcacatcagatcatagcggagttccggtatcagagcggtcggaggcaatttatccacgggcatctggttatagcttcgactaggcaagcctttgtatacctggtgacggaaattggctcgatcagtcaggatcgaagcttgtcacgaaaccctacttacaccgccgttgttcattactactatcaacatgcccagcttgttgcgtaccgcagtttcgatctccatcccagagaagccgaaggccgagtctcccacaacagcaactattggtcggcgcgtcgatccttccttgcacgcgcgctgttcatacaatgccgcagctatacagtaacccataccaactcccattgtcgcttgtgtacctgcatcgaggcgagatcggggtttcataacgtcgaacatgcttcgagcgatgtccatagtattcgcaccctctccgatgaagatatgatcgtcggggatattcctgcgaatgacattgaaggcttgatgataggtgagagggatgttgaccccactagatccgtttctagatagtcgaggtatgaccatcgccttctcgatcagcttttgggagttgtcgtggcaggtcgataagagcttcttataccaggtcgcttgatcctctgacatcatcgcgtacggatccagggcctggtcatttgcgcctagataatcgcacatctgcttaacaatcgcagaggcatcccccacaagcgcaacctcggcggcattgttgtcgttgatggactcaggatttatgtccaacctgatcagcttgacatccttactccatttaggcgtctggccatagtgaagtatccagttgagtcgagcgccgatgatgatcaccacgtccgcctctgatagagcagttgatcttgccgctgaaatacacattgagtgcttgtccgagatcaaccctttgcccatcggagtgggcaggaagggtaatggtagtatctgcaacaaacgtgcgatcggttcctctgcccgagcatattgtgcgctgcacattggagtaaattcagcgtccgggaattgtgtgtcgggcagcgcaacacgcaccctttcccaatgatcatgagaggtcgtttggcagatctgagaagagcgatcgcattctctatctgccgtctaggagctacgctctgaggtggaccgatatgttgcactggaatcgggctcgactgaacgtctagcgttccttgaatatggtccgcaggctacggatgcaggttgggagagcaaggtcagcacattgatacatgctcagctatactggcatcaactgacgagatccacataggtaggtcctggcttgccatgaaatgatatcctgaaagctttggccagggtattgggtaattgaggcaaggatggcgccctcgcagcaaatctgagcttagcatgtcgcatgtcagtgatgagtaccgagcacaaggaagttgaacgaagtccctcacttcacatgaggtttcaacaagcccacttgatccatttcttgaaacgctcccataccttgctggtatgactcgctggagccagccagtagtaacatgggccacgtatttgcctcggcgtgatgtgtaccagccatggctgctcgaacattcgagtcagtaaagctcggtcgaggtgatctgtcgtacattgaaacttaccatggatcaccccaggaccaccaacgactaggcagactccaggacggccgcttagatagccataggccgcagcagcctttgggacgtatctcttcagctcgtgatccgctgagaagccgggctaagacttacatatgctgcgctctgttcattccggaaaccaatgaaacgaattcctgcgtcgatacaggcttgagccacctcgattaccggtatgccaacgattccgaagacgacatccacttcgagatccttgagcgtccgagcgacaacgacagcaccggtgacatccgacatgtccttgatgagcgaggtctagaagcttgtcgagatcgtttacttcggctccagtgacgagaagagtgtgcaggttaatttaccacgatgttcaattggtatcagatgcttgggtagatcgtagacgatagatcttctcaaatcctcaggctcgcagtttaggagctaaacgttgatgcatggtgccttctgacccggtaaagcgggctcattgagcagcttgctgcgaggtaaccgaacctcatttactcccgaaagtgacgaatgggttggagaaagcttccgatgtcccccctctcaacttgcaagctatcgcaacaactttcaatttgccggcgacagaaccgcaataagttgtcaaacatactcttgaaacaagaatccatcggctaccgtattgcctattgccatcgcattacaggacgatcgcttgggcttaatacttggtcattggtgattgcccagcgacgacatcgcggatgagcgagttcgttgtgccacctcgacggaaatcgaagaaacgagctagcactcggtatcgggactcagcattgctgacgcccgccgagaggctagaacgtctgctgaaaacgctggagactagaagagagcagttgtccgatcagccacaataccaagcagcatggcgcagtgagcagtaataggcaccgcgacatatcagttccgcttgacggctgaaccacttgcgtcttgcatagaccagattaaggatgttcgaggtgtcatgtatggctcagaacataattcagccaacgcaagtgaagcggacatacacttagagcaggaagattgccctgctagcgaccctgacaagccgacggagctagcttttccgcttgcacaagtgctgtgtttgggtatcggcaaaattagcgagtctcgtgagagtcagtttcaattcatccagctacaagatatctcaaatttcctggaggtgagtattcctagcccgatcagtgcctcgcaacgcaaaattaaggcgcaatttggtagggaagcgaggtgtgggtctacgaccctttgcttgaccctgtggatttgctgctacttgagcataatggtttcaaggtcgtcgagaaaaatcaggtactccatactcgggaatttgagccaatccgagttgacgaaatttcgttgctcgtagctaggcaatcatcgactgccttctgatcggcccgcgttggcgtatctgccgcattgtcctagagacctttacgagactttcctacgagccaattggactagtcaccggttcggctggtctaaagatagcgccgtagcggagcttccggctgtttcaacaggtcgccacatgatggtggccaatgatttcgcagactatgctctcaggtgagtaccggtgactctagccttcgggatatttgactgttgacagcgattttaaaatcggcagtttaccgttgaacaagctaaacaaggaaagcccatgtatagctgcgattggtaaataaagcgtctaacagccttaggtctcgtcattcacgaattcatcattgcagctcctttacttgagaagcgtctcctgcctcatctgccaacgatgcatgtggcctttgcagctttttcttccctcgcttggcaacatttgcctgcgacgaacatgttaccggaagtccctcccccaattgagccaaagcaagcggacgaagcatcctcaatgggagaagtgctgacgactgagatagatgcaggcttctaacctgaaggcaaagcaccataaattcatcactaagtacggatatctcccgcttgtagctacgtatagcgccgtgacggtattttcgcctgggtcatgttcattatatccacagaatctactgctgcctgtttgcatatccccggaatcataatcatgtcgctcgtgcagatcgttgtatcattgcggatgccccaaccgtacccgccgcttggcaaacaagtaagcgctcctgtgcacatctatctcgatcatatggggtttgtacgtttccgtctctgaatgtgaatgtcaacgtggttctttatttgaaccattattactcaacaaaacacctcggttccggcagcagtcgatcggtttgcatagccgtgcaaagtgttgttgtagcctctgcagtacacagcttagagagctttctcatgcctacttgaaaagtgatagttgcagagaacctctctcagagggatgcgctggagaatgtgatacaccaatacatacctctatgtctacatattgttgtagtatgtaagccccatccataaagatgctcactcagactaacgttatcttataggtcctgcaaaagatcccgtgctgttggtagaccacacagtgttcatataggtgtaaagaggcgccatcgatcatcatctactatcgatacaattgtctgactgggaccgtctatagctaagaagtggccaccgttttttgcaatccaacatttgcctctttgattgtcatgggcttggcaatgcaacctggaagcttaaacagccctataggtgtgacatttggaacttcacccataaacaaggtacttgacaacgggatcaaacctacctatcagggtacaatcagatttgaagagtggaaagccttgagatctgtattttagccacgtttcctgcttgaataccgtgattaaggaaggattatacacgccataggccattactacggcggctatcattttgctagtgttcccagacttctccagctatccgttggaaatccggctgctgacatagtcaagatcctagcgtccttccgtcataccaacaatcaggccttgcgcactgaggaaacggcaatcactaatcaccttcacagtaacagactattgccagctctaaggccaacaatggcaacagccaatagtgtcaaattccaactgatcaggtcactcagtggcccaaagatgcctttggtatcttttattttgctcagcacaatgacctataccttcagccctcttccacttgtatctcttgttatagtcttgatcctgacaggtgtgtcaaaaagaggcaatacttgcgattgtggctgtgaaccaagctgggtgataaccacgattgcctacaccttccaacggtaactctttccctctcaattgtgtttctagccatggccatctaaaacaaaaaactctcaacaagtcatcagatataattcattctgttccatctcatacatcattgcttgatcaagcaacaagtcaatgtagctaaagttaaatgagcatgtggaccaggtttgggaaataacaaagaacttttcatgagacgagaatgattgcgccatgtcatttgatgttctgacaaaaggtgtataggccaaagatccatctgtttggttacaagtggaggtctgtcgtctatcataagggttacattgcttgtacaggattacaattacattgcgttctcgcttagattctacgttgtctcattcgagttgggtttcgccatcgttctgttcctctctctcctctctaacagtctcttgggagaaccctgcctgacgccttgctgtcattcaatagtgctcggaaagcatttgaatggagctgagccgactttttgtaaactaacctacagtcatttcccgagtcattgtctatgtttgataatccattgtttgggatagttccattaggacatgccctcccaacctaaaagtcaactaaagtcaactgaagaaccatcgatctaacatgtatcttgtgggagtatataccaaaaggaactctgaatggcaaaaaggtggtgagtccatcaaagggctagcaattgttctagttcacagacctatgtctcaaggtgaacctttggttgacttgtatcacttgtatatatatggaagactttcaccattaacatcctacctggatcatatactggatgcagtagtagcctaatacattagacgatgtatgtgggatggtttctctctcttagcggtcatgtcgagtatatgaatggtaaagtgaaaatgaattgagagtaatgcagatcctgccaacttttgatgaccttcaagcaagatcagattcagtatgcattcaatcatttggagttgtactaggaaatagtggaatagtatcagagattgtcagtcttagggcaggccaattctagatagacattagcagaacaaaaccaagctatggtgcaaatgtagatcaagcggctcgggcctgcttatagaacagagtaactgtagtacgatcagtcctgggctagatcatgtctatcccatgtaagaagagaaaagggatgcctttcctccttctggagactcctatatatacaccaaaaggctagtggtgtgtgtacaagagttgtgactagagtagtcacaaatgtgtgtccacagtcgcagttccgtggctgaatcgcagtagtgtgacaggagtcgcaatagtgtgacaggagtcgcaatagtgtgacaggagtcgcaatagtgtgacaggagtcgcaagatgtgattgtggtcgcaaatgagtgatcacagttgcatctttacgataggagtccccagaaggaggaaaggcatcccttttctcttctcttatgggaacccagaccccttgacaccagatttaatactcttacctttatcaccttcttcacctttcacctttgactttcctcaacaaggcttagctacccttattgcctattcaataaagacatcaagaagcttagacttggtgttgagacaactgcaagacggacatcattagctgtaagagcaccttttctctctctgggatctggtatggttacacaactaatgtattactggcctactacatcagtctacacctgttaggctgccagcagcacagattcttctccgggacttgtaacggtagcttgttgtcacaggacactttcggctcgcatcgggcgttatccgctgagcgcgacacgtgatcgggataacgcacatgttcaccgagcaagcgtggtttaggctactaacagtactttccggtacctatttggagcggatggggaaagacgcattggggaaagacgcgttgggggagaaagaggtagaaagaggtgaactttggggatatcggcgcttattggtagggtacagcacaagtattcaggggggacgtgccgtttgtatgtagaatgagaggactcaagcgtcgatattacatctctttgacacctagtgtttcacaagaattcaggtcacttcactgacgggtaacctttgataaagatacttaagcacggttcagcaatcttccgtatcacatctcgcgcgcggttatcgctcccgtgacacttgtatatacatgagtgtgtttatggatgaagtacataatacaagaagtataactaactatgtataatgtataaactcctgctccaatatacctctccaagagacacctctgtgactcgaccgataggtgcatacgtacggcgatgtattggcatgcgtactgcgaatggctgtaacaccttcctggagaccgaggtcactcatctatcggctgaaatcttgagacaggaactactcacaaagctgacctgcaagaggaacgctactgtggacaagctcaacaagcagtaccagctagactgttctcaaacacaatcgtggatcaatacatagtccagagggagatcatcctcaccggttgcattggtcccttctatgtagctctgaggccaggtgtgcctgcttggttttgacaggtggagtgcaatccatagccctgtagcgtaagtgtatgcttccagcagcagacattaagacgtcaagaccttcttgtccccctcaagctcgtctctaccgttcccttggtcgtcatcaactccgagatgacactcctgaacgccctgaacaagggcacgtctggcgcgatccacaaaagcttgccacaggagcccattcatagtaacgacaggagacagaccaagcccgccgttgcgttgagggccttgtcggcctcatattgtggctctcaaccagtatatgcagggtgagaacaagaggcgggagtgatggcgggaggggtggcactcttctccggttccttggacttacaaccgggagaggatgtggagacagtggcggagatgacgacgggggcggtagaggcagtgtgttaccgctcaggccgtaaccctcctagggtggcaagaggccttgtagtcttcttccctttagcttcagtcaacaaaacaatcgggccagaggttcaggggggaggagaggagatgctcactccaagtgttacgactgggtagaacttcgcttgacgtgttgttgttgttgttgttgttgccttttcgtgttgtcgagttgtcttacgtctcggttctcggttcgcgtttgtgtttcatctttcgttgtcgctgggaatagtcaggttcgtgacaccaagatcttggcgcaaagtcccaaacaggtggtcctgaaagaaatggaaagggagagctgtagcgcgataccaagggagatgatctacagcgcaccatcaccgcatcaaaccgcgccggggacgtgttctgaagcgaccaaatcggtcagcaatggtcaatgtgtctctgctcctgccaacaacaaaacctctatccctgccaaccaagacagcgcagatatgcctaagaggttttcatacaaaatggatagtggaccatttgaatacttcagaagatgcgatgcagcccctgctaggaaactgtagtggacaactaataccaagacaaattgaaggcaaacaactattttgattttgtgatcccaatatcacgttccagatcacttgtagattaagagtacattgttcctctcaactttagctcttgctgatgatatcgtgatgatgacgccatattgctcctcgagctgtttgatcttctgctgccgaatcacacaggcaggatggtacacattcagatgtagactgcactcaaacgaatcacaaatgagtttgcgtggcattaagcccatatggacagggatcagggattaggctatctctatggaccaaaataaccctctgagatctatccaggctctgtgcctcaatgacaacctccaaatgcacctgatatcagcattgttaagtaacaatcctaatgtgtctgttgtgttgaggtaatttgtacgtcacatgagatgactgggctgggatcgtctagaagcaccagtttttccagattttacctgatttgccagcctttacatacccctgcaatatatgacatattgatctacacatttgagcttgttctgcgccccaacatgaatcggttcgtggtctgtgtgcgcgtgatcagaacagtgcatgtcctgcaccgtgctgttttagagtccccccccccgccccactgatccagggagacctcatgaggaacttttcaccagcgcccatcctgtgatagtcatctctggtgttttcgcatgcgccggtcccagcttggcagtccgcaagttacgaaccacccggctcagcttcgtcggagacctctgtaacaactctgcagctaacaagatgatactgaacggtaagagcttttgactatctgccagttctcagggatgactgactgtctgtggagtgatgttcctgaccaaaatatgcatggcagtaaccttgtgagagagcgtcatataaaaaattgacacaggttgttgagaagtagtcaaggcaaaagtttgttcattgtttgccaacatactatgttgcaccggtgcttcagacatatgtcaagactggtacgcagtggaccctatcttactcctcccctccttgttattatagtgagggggtgattgcaagtagcagccaggctgaagggtactttttttaaaaacagctgcacaaagttgctgttaccgctcaggctgtaggcaacggtcccacctgggagagcgcgtcacgtgacgcgccagaggaggtctccaaggggagtcccaagtgaaagtccgtctgtcgacatcctactgtactacgatgctacggatgccttaggcatccgttattacttgtacacaatgacccctaccttcgcccctctcccgcttactgccccggtggaaccttccgatggaaccctccaccctaacagctgccaccaggctgtttaaggcaccaaatcagcacctctcgagatgctggaacctttactagtaaaattgtcccagcctgaaaagtccaaaaacagcaggctggaaatggagatcacctacttttctgggtactagcgcaaattggctggctgtgttaccgttcaggtcaataggtcgtatccgtggatacctaccacaatgaatcacagctgatgccaccttggggtgctccctggtggggtcacgtgacagactccaaggacaatccctcacagaggtccttgtaccagacacgtagaacactagagaggcatatcccatagtgtagaccgttgcagtagaactggtgctgcatctgtcatacaatcctaggtaggagaccttaggtacacaagtcctgtgtggagtagcaagatagccaagctctaatcctaacaatctgctgcacacagcctgagcgttatcgttgacctgactagcttcatcaactgcttctccctacctcaagttgaccgagcttctggaaggaatatgggtcacgtcaattcaggcgggtaggcaaattaccgacaactgaaggaatcctaacgtggtcgacttctaggcaatcctcttctgcatgccatcccgtacatcttcaatgttgcaaataggcatgccatgattggctcatggatgcaggaagcaagctctgttgaagattggcatgctatgacatcataggtgatgctcagggtgcaatctcaagcaaaaagggtcaacatgtgactaggatcacatgttgtgactggagtcacgcttatgcaactggagtcgcacatcagtgactcatttgcgactggagttgcactcatgcatctgaattgcaaatctgcaacagcctagttgcaagtacactgggagtacactaggaggacatgctcataagaatagtatatataggagaccatctggacctcagtttctttccctctaccatgtattactttacttttcgcaagcaacattgatcatcctttcacagcaagcaacatctatcatctgtaagagacaatagacatagtgactacaaccactaccaaggagtggctacacaccattggcagcagccaatatcacaacattcaacctgctactgggggacatgatcagattgcagggtgcaaggctagtttggcatgaccaaacccacgtcctgtacaggaaccccgtctcgtcactactgagcaagactgactatcaaccaagacattgtaaaaagaatactgagggaatgtacccgtgccaatgccaacccctatggtaagtgcgtccatgatgacggcatcaatgaaccgacttggcacttgcaacggaagctgagaaacgctcttgctgcagaggaactacctattccctgtccatattacctcacgctctgggtatacgtaaacggtaccctggacaggatgcgtgttggacctgtagctaagtcgcggatgtgctgggaagacatcttcaaggccaccgctcattattgctataagaggaacccttgtcggctcgaattcgtatcccatgcattgtaaacgacagagaccaacgtgcagcatcacatctctaaccaacaccagctatttggcgttattgctgacaaagacaagagattcacggctctggtaaagttcatctggcagaaggctacatggaatataccaaattccatgaccagattgttacagatgtcactctggatatgttgcaatcagactgaaatggcttagcgacctgtcccaacatggaatgacacaaggttgcagcagctgagtacaccaatgccctggtctctgcccttgtgcccttcttgagagcgtgtgaccacatagccacgaaccaggtcttgtttactgacgacctgttggacatttcgtttccacgcctggctaatagccggccagaacttatcgccatctcaacaaccaatcattgtaaagttggtcaacaccaatcaatccattcaaaccggctttggctctgtttcctgtgacaccgagggtcaaaagcatttaggtacctgttacgggaagcgacgcgcatccggctggcgcacttacggcttcggcttgcgcgttttcgtaacctgttctcgtcaccttctctgctatcgttaccactaccatcgacacaacgcatattcgatatcaccaccagcggagaacaatagcggcatcgacagatatcgaacaaagacctcatagcttgacaaccgactacatcgaacaaagatatctcgactcagcaaacgacaattcatctttgttagatgtccgactcccgaccctcaattcggttctctttgttccgaattcgcttcaccgttcttggaccgcctgttgttctcgacccgctacgagtactctcggtttcgtatatatacttagtaggacttgaccaaatccggcagacgacgttcttgtactaggaaggtcaagttccaatatcgcattctatttacgcctaccgatttgcgacagcaccgcatcttcaagacgtattgtgaagaggttacaacccaggacactcgctaagtagtagacgtctcaccgttcgtactgaacaagctttcgatcctagctacctatagcgacattacttccttatccgtacatcaacccggattcgtatcatcccaaccgaattcgctcccattagccaaactcggcttccctcctgttgtgactatctacgatccgtaccgacattgcactcagatattcattagacgcgacttagcgaagctccgccgtaacagtacccttctggacaagcccttctctattggaggcaggagtgattgtctcaaccctggctgaacgatttgaaaggcttatctggaccatgccctccactcatcccaagtatggtgactgtttcttccacatctagttcagggctcttatcattcttgcaatggagcttgaaaagcttggctcagattcacctggagatttctcatcttacaaattccaccttgatgctggagaagacatcaaatttcatgagaccaattgttacgggcaatctgcaagcgggtctccggtacagtacgtgataggctaatttgaatacacaggtcttgatgacgtgtcgggtgtttggtgtgtgtgttgttgaacttgagacatccaacacgagtttgaaaatggtcaataggtcgggactcagcttgcgccttgaccaccatatactgaatcaaacaagtaatataccgactgcccttgccctcgcattgtgtctcgcttgattcaaaacccactcgcccagaacgctctctggcgagcttctcgacactgtcattcagcaccgtgtacaagcagatcgcttcagcggtctcaaccgccaggctgagggacctcgtacataagacgccgtagatgagtagcataacgcttttttgtgatcggtatgtggcactgtgcagaccattgtcaaggagctgctttgcacgcagacagcgaatcatactttcgcttataccgacctgggattgttcgaacgctctatcatgatgctagattacaaccgagacgcgaatcaatgcgatgattgcacgttttgtaacggaaatggtggctcgacgcagataaatacccaaagcggccgtcgtagtgagagccgcaaggagaccagcggagatgttgtcttttggcactttttgacccttaagagctcaagcgtcgcatgatgagttcgtaactattcaagcagtaagcgtcatgcgtctgtgagcggcttggcccatgcaagggagaagagaatgaggaagaggcggagctcacgtaagcatggtcactgcactacttggcacagtccggaccagatttatgctgattcccctatagaaacctttccagccgtctcgtctcgcgatacttgacatggtttgcagtaagccttgattggagtgctttgaatcagctaggacctgactaccccgtatcgacgcagacgccacttgggcgccggatgcggactgcttcggcggattctgtgcgacgagatcggctcgctctcttcgctgtatttgtaaccgagttcgtaatacctcgtggggataggtgatcacggatgcaaccatcttggacaatgctgagcaaatcagaatactttgggaattcaaaggtccgccatcctccggtgctgttggatcgaacgactttcagccgaagctggtatgagcttgtgcaaggggtcaactcacctgcccaggctttcatcttttcgtagagcgggaaatgcacagcgacgtgagtcacgcctattaggctgggcgccaatcctttataaaaggctctccagccctcagttttgtagatcgagcggaacgctatccatgtattcgtataccgctcgctagcatcagccgatgtcgcttgggcctgagggtagcttcgcggcattagatcacgccacaattaaacacaaaacaaggtccgtagacttgccataaagcgagttctgatcagccatagagggttggtgacgacggtccccgtcgcccccgccgtcatggcagcgattatatgtactccccaatgatcggtaccgtccggaactatgaatatcctcactagacgtgagtgtgtctgtgcaacggagtgcagaggatagcagacttaccatcaggcgtcagggagtttttgatctggtcatagacactgaaatatattccccatgtcgggagataccccaagaccgttgggccaagaccgcggtataagcctcggataccggcgctcctccatatcctgtttatggtctccttgacaccctcgtaatcagctgcgcctttcctgctaacttgtgcttgcagtcgtgtcttgactacatcaagaggacatgtgacgatgctggatacgagtccagcacctgctccggcaagcatcgaatgatatgcctgaggaatggcggttgagcgggagggagggctttcgtgagacttcgagcttgattcacgctgagacccggcatgcggctccggggagacctgatgttccctttgatcactgtcagtggtcgagatttcatggggaacgccagtcgaaattgaagaggccgaggcttggtaccacggcttccatgccgtgacttttgggtcatatccggggatgctctcccgagccatcccgaaacggcttgtcggttctgagtgaggcggtagaagtccctgtgggacgcggttcaacccaaagtatgaactgaactcatgttgtggtcggatttccaaatctcctctccccccatccgcattgtagaatcgcgacaaccgagatgtgctagcctgagcgtttggctgcacgaagaattggtccatccaggtgttgtcgtggtcgccgctaacatgttggcagtcggaaaatagaatgaggtgtctgatgcaagggaacggacctggcaaaagctcacccgaccggaagagctcgcagtggaacagatccacgagcgtggatgaaccgagacccctaaatctcacaacgtccaaggcctagatcgcgtctcacaagaggatatttgacctgttccgaccttgtacagatacggaggaggatgatctagcactgatgctcggtgttatatgtaaatcaatgcctgcgagttgatgacccagagtttcgctgctattgtgaacgggcacgcaagtacagtacggtgttgacggtcgggtcgtccggggccgaggtaggtagggagctggggcttgggagggaatgctcgctcgtccccgttcgtcgcgtttagcggttactcatatcccgtctcatagcagccatagcagcctaacccttactcattattcactcaaatctgtcaacccggtcgtcgtgaaagagcgctaccagtacatcaagatccttggaccataacgagtcaacttaaacttgcaatctctttcaatcatgcctagcatcgaactcgtagccgacttgccaggtcatgcgggacccgcctgggctgtatcttggaacccgtgtcgccctatacttgcatcgtgttctagcgataagacggttcgcttgtatgggtatacaatcaagcaatcagtcgactcgggttctgatgatcagatcgaatttcgattcttgcaagagattcccaccgctcacaagcgtacgatccggtccatttcatggtctccgaacggaaagtccctagctaccggctcgttcgactcgacggtcggcatatgggaggaagtcgacgaatacgaaggagtagagggggtggaaggacacgtcgaagattcgacagatagggagtgggaatgcatcacgacactggaaggtcacgagagtgaatgcaagggcgttagctggagtgcagacggtacgcttctagcgagctgttctcgagacaagagcgtatggatctgggaatgtaagtcttggtagtaagtcttgcatcaagagaccaaaactgacctcgtgagggaaatagtacaggcggatggggacttcgaatgcatatccgtcatgatggaacactctcaagacgtcaagtcgatcgcgtggcatccgtccgaggaggtgagccttctccatttcggcaaaactggaccatcagcttgaacagagtccgtccatataaacagatccttgcatcggcttcgtatgatgcatccatctacctatttgccgatgatcccgactcggactggtctccgtttcaaaaactcaacccgagtttacccgcaactcctgcttcggtgttgtcggcggacccgtcgtcttcatcagtcacaacggattcgtcgccatctgatttcgtcgtgccaccgcttcaagatcccgagacggtctggtctgtggcattcagcccatgtggacaatatcttgcgagtggcggtgatggcggtgggattcggatttgggaacgaaggtgcgccccttcccctgaagacacgctaaggttatagaactgaccataggcttactcgtagtggtagcgagactgactcaagatgggtcgagaaagtccacgtggaagctcaccgcactcgggcgtgcttcagcttgtcgtggatcgctcaagcgggcgaaagcgtacgaagtattgacgagaataggatcggcaggcttgtcagtgctggaggcgatggctgcatatgcttctgggatgtggtaagccaacgctgcgatgatttatattcggcgtagcgactgacattatgtgacaaaggccaaggggtcactcgaagataaatcctcctcatctattcagatgcaaatactggcgactcaggacaaggctcatacgatctatgacatcaattcgatcgaaatcctgcaacgaccatcaacaaaagtatcgggggcaatcgccgccgacgctctcaacgataccaataagcctatgttcgcgaccgctggcgatgacggcggcgtgaaagtatggcttataagggaagaataagcgggcgatggagcctgggccaacaaaatcacatgtcatgtttataaagcaacatatggctcatggtagcgacaaccctttacacatctaacgtttaaaggcatctattcacggatgagaagtaggttgcggccagctgtcgatcctgctccgcttcgcgggctgtcccgtacagacagccgttggtaggagagaggtggctgtcgcattgaaggagctgcacaaccatatctttggtgtcaataacgaaatttccagaacggtccaatgcaagtcacttactttggataaggacaccctgcaacagctacccaagcgccttcagtatccgccgcgttcgcccaaccactgcctacggctacgccggcaagttgactgggctgagcgagagttttgcgttctccagtctgcgtgaacgtgggaagcagcaggacctgagcagcatcaaacgatggtgaagggcccagcgattgaggtggccatgccgagtagttggcaatgcttgccgtggcaatgacgccatctccctgtcgtttcgattcaggttaaactctttgtttgatcgtcgaccgtacaaacgccagcagctcaccttgcctatggcgctcgaggggaattctccagaaaatttgtccccaccaacgccaagactcgcacacatgcctacatgggcgcgggggtcacgagggatccagccctgttcgcgtcccagtttataatgccaaaagggcgatgacggccagctctgcgactgaggtgttccgatgcgccatgtccaaaacatgaagttctgcaaggcgtccatctctgccaagacaaagttactgatatttgcctttaattcaggcgaccaggatcgccagtcgttccagcttgtgcagcttttgcccgtcgactcgtaagtggcagcgcctccaacacctgtcaaccacatgccgcaactgaggaagggaaaggaatcggctaagatactttccgcaatgtgggtcatcgcctggcttactcgttgatcgctgcggagaactcccccccaatgacaataccgaagttgctctgcgattcattcgtgccgccgccccagccacaaacagtggtgtattgctcctgccacggtatgtccattgcggcagggtcaatgaacgctcggtaagggtgttctagaagaggcggcaagtgccaaagacttagtcctcatcgtccttcagatctgcagctggctacttacggtccagagcaagcctgtccgcgcctggcatgaagccgttaaagggtcgaataccttcgaagccttcatgaatcacgacaatgggacccttgcctgctccgatgccagtgatacgtcgtatcagattgtacgcctcataatagctgcaacgaagatcaatcaatcactaaggctttgattgaggcgcacagcaactagacgcactaagaaagcaaagtgttgaacccgatctctgcggcaacgacctcattgacgaggctgaccatggtcacaacgtctttgtattcttcttgactggcgaattctgtcacggtccggaccacctccaagctccgctgggcattggcgagacccataaccccgtatagccaattcacgggtccgcttgacatggcgtggttccatttgttttggcttcctgtcgtgatgcaatccgtcggcaggctcagctcgcaacgtccgcatgtcaagagagataagaaagtttgaaatacctggtagcgcatggagatctagcaggactcgaataccatatttcctggcccagcccaatgctcgaacgaagtagtcccacgatacaccttctagaaaaggctctgactctaaggtgctcacagcccaaaatcccaaggggattcggacgtaatttctaagttggaagtagttaacgtctggtcggaagtgccaaatcaggcactcaggagcttacaagccagctccggcgatttcggcgaagtcttgttcggtaatgaacgtctcgtagtgttcacgaagcgcaagctccctgtttttagaattgtaagccaaacgttcaaggctgatggactgaacttatctcacagtgtgacgttcgatacggctcgcattttggcatgtagctcactgaaccgcaaagtatcgcgtccaaagtcagcccacttttcgggctaaagcgaatagcaacgcttaccgttcgttcagggtacctgcccactgcccttgaaacatggcaggagcgataaaaggctcgagaaccagccatcctcccaaattgactccgcgcacgaggtctgtaccccagttccaaggttcgccgatcgcgggcgaccagctctgcgccttgcctcccttggcaaaagggttgttagggtcatggaagaaggttccaccgaactcgtttatgtaggtgaattcgaggacatccccgttgacgtgcgatgtgacgacacttccattgcctccttcttggacgtcggtagagttgagcgaggccaaaggattgaacagagagtctgatgcatagtaacgggctaattcgctctcgtcaggtgttttactcgtagtgttcgtgcttcctctgttcggacggcgagtagccgttggctctggatcatcgctctttcggctcgtcacatatgccaccgggatgaccatggccagcacaacgaccgtgacaacgacaccgatcacgatcaggcgcttcttcttttgtcttctacgcttctcgatcatcctctccctggcttctctattggattggcgagtcgcgactgaagcagagcttggcgctggtccctgccgtcctgaacgaacgctagctgccctgctattgaagccggagtgaccttgattagagtcggatttgaaagggtcttggtcgagaaattgttcctgtatagggaccactgggctaccggctcgatatccttgacgctctttcagagcatatgcgggttcctgtacagaaagatgatctggagaaggaaaggaccgctcgttaggaagtccaagacctaatccggtagctgcagtgtataggtcggggtatctcgatcgatcgtccgtctggccgaaggactcgattgaggggctcggactgatcccggtgtttcggtctccaatatagggcagatgcctctcggattccgaaaaagtcaagcctttggaggcagaccgggggattggagccttcagttccggctgagaagagggctcgtagtaatagtctgggacgtgaaaagactatgaaacgcggaaagtgtgtcggtggcattagcgattcaagaacgtcaagatggcgtgttcaatcgacaagtctttaagaaagtcaatcgtcctagaagaagtccacagctgtgcaaggaggagcagtgtgctctccctcccgtcgtcgcgtttgtgactgaccaggcatgtcgcactcgtcgaccatacgagcgttgttgttacgggccatttcgcgctcaagtcaactctctcggtctctccttctcgtctgcattgccccctttggttgatgttttgttttgatcgatgtcatcatgattgcatgatcatcgcgatcatcgctcgcgtcgacaccccttcctttgatcgctttcttcatttctccttttcttcgcttaggagaccccgtacttcctttcttccactgcgcgactacactcctggcttttggtaacggagtggtgagcttacctgaactctagcaccgggttgaatgtaatcttccggatcatcctcgatggtaaaatgtgactcggttggggagctgatcttgggattgtaattatcccgatgtcctcgtgccattttgtccctgtcgttgccgatagatcgggctttgtggaaggggagagcgtctttcagcggaaccgtgtcgttcaagtcgatcgtgattatgctatgttggcctgatgtctgatgatgaggtctaggattcttctctataccttcgaaatcttcgacagatatcggttgagcatgagctcaagagacgatcgcgtctcgacggggttcggcttttgtccgagagaaaccttcgacgcgtgatgccgagagattatcggaagcattcatcctcgcaccaggcggacgggacagagccacgcgtggaacgccgagaattttaggaacgtttccttttcactgtcactgtcatcttatatttgctttaggtttagcctagtcacggcgacactggtcctgagccaggtatgatgatgggaggatacaaagtacaaagatgcgaacacgcgtacagccagacaaggaaagaagcggaagtaatcgcgcgggtgggttcttggaacatgcatttcaatcgtcatgggagatcttgatttaccttccgaggttcaagggcggcatcgaccccaaagaagaggtacggttgcgcgcgagaatcccgttggacgctgttttgcgagtcttgcggcgtcggggttgaatctcgtggttgtacgactgctcgtgtaccgcctccaggataggagagacaatcatgccgtgaggatacccaagcggaccggtgcttgctcctgccagagttgaagccatcgatgggctagagaaactgcctcgaaagggcccagcggccgcttgatgcgaaggtgacggaatcgtcgcgtcgccggtatggcgacttctgcgaaaggtggtgatggggacccgctcccaccgctgtagattccgcaaatgtcgaggtggctcgtggctctctgagattgcctgatgatcaatgtcatgggtataatgatgcaaagcatcgacgtccagcacgtcgtcgatcgagatcggctcgatcatgatttccacgtctgaaggcgtatcctcgcgctcaaagggctcgtgacgcatgtttgggtgcataggtgaaccacgcatggatccgaaacggctggaagccggtaccgacgagtaacgagggcgcccgacaggcgaagcggccggactttgcccgaatgttcgtttcttgatgctccctcgatccgttcccctgcttcgaccacgggcaagccctctacggacaaatggagatggcgcagccttgccggtaccgtcgatcacggcgactcgctcaggatccgctgcatcacgcgtaaatgaccccattaggggaatgccgattggcccgttggcagatgcggctggagagatagctccaatgccatcaggcgacagagcgtcgtgcacaggtggtgtggtgagggatgtggagctcgtccgcgattgctcttgactgccggtatccgcgaagacaaaggggttctgcatcgagtcgagaggcattgggagacccgccaacggttccgacatgacaatgtcgttatccatacttaacccagagactcctcctaggatgtgttgctgctcctcggcacgagctcgttcgagcaagtgtctcgcgtctgccaaaggcaaaccgaggtctctagccagggcagcttcgtcaactgtggtcacgccaaatgccgcattgttcgcttcgagaccggcggccgcaagcgagaacggaatgatgtcgggtggactgggcatgtcttcttcaggcaagctatccgtggtatctcccccatcactcataccgtcgtcataaatgtcgccttccgtctcaaaagcctcagcatctaccagcaaagcgggtccttccccgttaatggtgctgcctgagctcgctttgcttcccttgccagagcgtctgcttcccttgctgcgtgatttgctcgtcgcccgacttggtcgaggcttttcctcgggctccatgacgggttgtgcaaagaccagattgccagaccagtcctccatcaacacgagaggtagattgctggctgatccgaaaccgaactcgtcgttgttgaagaagtcgtcgtcctccgagtctgatgaaaaggtagcgctggattcatcttccgtcgcgtccgtatcggcgacaccgccatcgtccgtctgagcggtatcttcaaaatcatcaagcgcagcgaagagtatttcctggtaaagggcgaacgtcaattagctacagcctcatgtccgttgcggggtggccatctcacctcctcctcttcgtcggtactccaagcgtggttgggttgggccacgtccaagaagacgtcctcgacgttggtcggatcgataccttcaggcaactgcggctcgttatccaacgcttgaggttgtcccgatgggaactgcatgtcttcctccagggatcccgcaaaagcggattcgagcggcaagtcgacatgtcgctggagatatgaacataacggctcagaaatcagaacccggaaagaatagtgatcgccaccgaactactaacgtctctatgtctatgcctgtgcgcatgagaggaacaggaacatcgcttgcttccgtgtctacgacgacgcttctctcgcttgatttttcgatcgattctgtcaggtatggagttgagattagcaagacagagctttgatagtgatctgattaaatgcatacttggcggcctcatcttccgatttatattcgtcgggtagactgctcaattcgtccgaatcgtcatcgaaacccgaggctttcgcgacggtgtggctgtttcctagacctgaattaagcttttccctcctcgcgctatttcgctcgatggaggccaacttctgatctttcttcttggatttgagcacatcggcagttcgtttttcccggtccgcatcgcccttcacatgtgttccgttcgtcttgctcacttcgttcgcttcccggacagcggtctttcccttgcgatcttttccggcatcgggtttcttgttcaccgccttcttgtgcttcgactcgttgccgttctttctcgcaatctcaacagagggctgcactgaatccttcctcttgcgatgggaggaaaacgtcccgtcatcttcagcgtagtcggcatcccctccatcatcctcgtcctcctcttcatcgtcgtctaggatgatagggtagtggtatttgacgggagggcgaggacgaggacccgagggtcccacttctgtgaagaattgactcgtagggggtccggcgttgttggtgccgaccttgaggcggactttgggtatttggggcaccgaattcgttggcttcgcagcggtgatcagtgatcctgccttgttaccaaccggggtatgggttgttgtggtggcggaagaagatgtgatcgaatctgtacatcaacgtcaatcccgagaacgcagcgatgtaaagacgacgaaaggtcaatatcgatcgcgaaccggttgcaaaactttttttcggacaaggccgaaggagacttactgggagggggcatcatctttttctgagaaggctgaccaatctgaccaggtgtgggtttgggtggtatgctagacatgtcgagatgtagaggttcactttcttgcgtgagggatgttcgggatgggtctcgagggattatcgtgttgatgtttgggtcgtgcgaccactcgttttcttttcgtctgtttggctcgcaagggtgattctattctcgaatcgaccgaaaacggctttgctttcctgcgcacaagagcaggtattgatccaggtaactgtgcttcactcgtctgagtgttctggcgggtaccgtccaagaggtccccgtcgaaaatatctatctcgcgctactttccgctcaatctcttctccgtccttccctgctggtccctcttttcaggttgttggtaatgttgaagtcggcgtgcccgatgtctgagataatgttgtttttatggaagaagatgtctttccgtgaagggaagttctgacgagagaacgacgaggtgaatctgaagcgttttggcgaatcgagcataatctctagcgaaagtgagcgaggtattgaacctgatccgaagacaatcggaccggttgtcaatagcaaaagtaactttgagcgggcgagagaagcgatggttgaacggctgtaggtggtcgtaggatgtgagacgatggcgatgtgagattgatgacgagctcgagatatttcgatagaaaggttggaatagccgtcgactagatatgactgttcgaccgaggacgtcgccaaaggcagattccggagtggctagctagcttgaagtgattcgtccgagtcgatgtcgacagacgcacgtagtgttgatgggataaatgtgcctttgagatttgatgaacgagtccgaagaagtgacctggtcgagaaccacgagcttgaatgatataggtgcaagtctggaaccgttggttggtcggcgtagcttggtatagtgtgagggtgattttagaaatcttctcttccggtatgcggtccctgggctcgtctgtctctcgcgcgagggcgggagggcgagggacactctttttacctcgattataaccatcatcgtagacatcacagtgcattcgagagggttaattacttctcatgaattagggcttcaatttccaggtaataccgtcccaatatgacgcctacaacgtcggcaaaggtgatcgtattcaattaggtcgacgttgattgggaaacctctcgagcgcggaactccgagattccggagtgtggaggcgagcgagtgagcgaggaaagttgtccaagtcatgaccaagatcgtcattcattcacatatacccacactctctacaagttacatacctcgtaccatattccaccatcatacatttctgcctcgatctgcaccatctgagactgataatcacaatcatactcccaagtgcaaaccaagcccacccgaaatcaccgtagacgaccccacgcatagcatccgacacattcagcatggcttcaatcgcgagatcgtcaagcagcatttcccggaccctcgtccagtccgttcgatctcagcgtgagtcgtcaatgaaggtgtcctcagtcacatacccggatgtagcagctcatatattcgcgtcgatgtgatgtactatagggaccgatctgatgcaggagagcgtccgaggcaagtcgatcctctctgtcaaacgtcatctttgaacaatatgctcatcctctctacttgccgctataggagtctccatcaggagcttgaggctcgcaccgaatctctccttctcatctagccggtccatgtccacgtcgtctgtccgtcgaggtctgatctcgagtggcgaacgttcggtacggggaaagacccacaaccgaacgcccacgtcgttcggtcaacaaggtgcgctgaatcaaaccggctcaagtcgctcgaatcgcctcggtactgatacgcttcctcgcctcccatggcggttcagtacgcacaatgttcattcagaccgagacgaccccgaacgaagcctcgctcaaattcatccctggcgtccccgtcatgatcaacggcggcacgtacgagatcctcgacgctcggggctccctcgtctcccctctcgctgtccgtctgatgggtatcgaggggatcacctcggtcttttacggacccgatttcgtcacggtcagcaaggacgatactcaaccgtggagcatcctcaagcccgagatctttagcatcttgatggaacatttcacttcgggcaagaacctcttcaaggacgattcgggcgagatggatgggcctcaggataccaagatcttggataccgattccgaggtcgtcgccatgatcaaggaactcttggacacccgggtccgacctgccatccaggaagacggcggggatatcgagttcaaggggttcgaagaggaggatgggatcgtccggctcaagctcaagctagctgtcgtcaccgacctcaaagaccattactcctggtgaacaccatcatcatcatcatcattcatctcgaccataagctccgtcatagagctaatttcttgcatcttatcatattcaaatcggatctgtcatcatggatcagcaactcatcgcgctcatcaacaaggtgagcttggcttgacaatcgatcgaggggttcgggtatgcacgacgacgacgacgacgacgacgacgtgatgagaacatacacagcctcgcgttctgctatcaccgtcccaaccccgatcgacgcacatcgagcagccttgagctcagcagactaacgctcatcgaccctgtcatcccaccttttcgttgtagctgcaagatgtcttcgcatccatcggagtcagtaacaacatcgtaagcctcaaccaccttgtctagccctttgcgcggagaaagagctcattccacgtcggtctcgccgggttacgataatgtacacaggacctgcctcagatcacagtgatcggatctcagagtagtggaaagagtagtgtcctcgaggtcagtctttttgccggatcgcacggaacggaagggcgagccgagttgagctgataacgtcgtatcgcattgccgcctcctgatacatccggaacatgcatctttccttaccataccatttcattcgatcacacacaatccgatccttcacgtcgcttggataccgcacgacgcccattcctcgtcgagtagaacatcgtcggacgagactttttgcctcgagggacgggaatcgtcactcgtcgacctttggtacgtccccccccgcgcggctgaccgttaggcacgcggatgagcaagtgcggagcttatcgaggatcgtctggtccggatacaggtcttgcaattgatcaacagaccggcggctaacaagcccaaggaggaaaaggagggagagtcgggtgagtggtcaggtatccccttcccccctcgtggaggtcagctctcgaggctgatggacctccgtcacactgcgatcggtagaggaacgcaccaatgccaacaacgaaaacgagtggggtgaattcctacaccttcccggtcaaaagttccacgactttgccaagatccgggacgagatcgtcagggacacggacaagatgacgggcaagaacgcggggatctcgcccaaccctatcaatctgaggatcttttcccccaacgtcctcaccctcaccctggtcgacctgcccgggctgaccaaggtgcccgtcggggaccagccgagggacatcgagaggcagatcagggaaatgttgttgaaattcatctcgaaacccaatgccatcatcctcgccgtcaccgcggccaacacggacttggcaaactcggacgggttgaagatggcgagggacgtggatccagaggggaccaggacgatcggagttttgaccaaggtcgatctgatgtgagcgagcagacggcatttctttgacccccagcccctccccgccgaccccacgaccgacgctgaatgctccactgtgaatgcgtcacatcctacagggaccaaggaaccgacgtagttgacattctcgccggccgaatcatcccccttcgactggggtacgtccccgtcgtcaaccgaggtcaaagagatatcgatcagagcaagacgatcgcctcggccctggagaacgagcgcaagtttttcgaaaaccattcgagttacgctagcaaggcgcagtactgcgggacgccttatctggcccgaaagctaaacgtcgtgagtgtgctcgcccgtagtggtttcgtcctgcctgtcgaatcgatcgaatcgcgctgatcacacgtgttgttgttgtcgttgatgttgacgccggcgttgttgagaccagatcttgatgcatcatattcgatcgaccttgcccgatatcaaggcgaggatcggatcccagttggcaaagtactcggcagagttgaaggccctcggtggggccatgggcgagaccaacccggtaagtcgctcgagatgatgaaacccgaaagcgtaagatcaaacgaacttatcaaattgatgcgttccttgccgatttcagggaagcgtcgtgctctccaccatcaccgagttttgctccgagttccgaaccatgatcgacggaaacaccaacgacctctcgctcaacgagttgtccggcggagcccgtatcagtttcgtcttccacgagctgttcaacaatggagtcagggggatcgacccgttcgatcaggtcaaggacggggatattaggaccatcttgtacaactcttctgtgagtctgccgtggtgtgtcattttggcatcatggacaagcggcttacaaatgcggtgccattgttttctccttcatgtcctagggttcgaccccttcgctctttgtaggcactaccgcgttcgaagtcatcgtcaaacagcagatccgaagattggaagagccgtctctgcgatgttgtcagctcgtctacgacgaattgatcaggattttgggtcagctcttggtcaagacagtgagtggtggcggctgagcttgatcggaatgaccccccgttgatcgtctcttgatcgcctgccatagtcgtccttcaagcgatacccggagctgcgagataggttcaactcggtcgtcatcaactttttcaaagagtcaatggtgccgaccaacaagctggtcacggacatggtcgcgtaagtcgctcgcgaatgtacgtctggtccgttcgatcacgtagctgacgaagaccatgaatagaatgcaagcctgttacgtcaacaccacgcaccccgactttttgaacggtcacaaggccatgtcgatcgtgcaagatcgcctcaacgccaacaaacccatcgagaagcctctggaccccaagtctggcaagttggcccctggcgctctcaacaacgggagggatctcgacgccgattacaagaaggaggaacccagcttctttaacagtttcttcaacaaggacaagggccccaagaggaagggaacgcccgtcatggaagctgtaagtcacgcgtctgcctatgcgacggcctgtcgagcaagagagcagagctgagccagcgctgcgcagcctcctcctgtgatccgaccagttgcgactttgaacgagcgagagttgatggagaccgaagtcatcagtaagcaagcgcgaggctctgttgctttgggtacatcgttgacctgatcatcggcgatacagaacttttgatcgtgtcatacttttcggtcgtgaaacgtcagttcctggtcgctgggtcgttcactctgagcgttgtttgctaagtttcgatcgattgcaggggaaatgatcgacatggtgccaaaagccatcaccctgactttggtcaactttgccaaggagaacatgcagcgtgtccttctcgaacatctctacagtaagcaccgataattcgccggaacgtcaaacccgaccgacccggctcaccgagacattactgcgatctgcctacagagccggagatcttggaggaattgttgaaggaatctcccgatatcgtgtcgaggcgcaaggagtgcatcaagatggttggagctctgaatcaagcagaggctatgtaagttggaccttgttttgccggtcgatcccgtctatcccgctgatcagtcttgagtcgtcgcgctcgcgttcatcagcatctcgactgtctgaggagtacgaaaagattggcagttcgggtagcattcttcgattccgcgtcacttggtttgtatctttggacccatttcctcttccctcatagctattatgatcttcatcaatcgaatcaatcgaaacatgacgaatccatgctgtgtgttctataccgctacattcttcgtatcacgacgtctattccgtatgctacattatttgatctgaacccctatgcgctgtatcgtctcctccttcggtgtcggcggcgtcataaggcacttgagcccgagttcgaaccatttcgcctgatcttcgttgaattgctttccgctcatcctgagtgagagcgcttgagcgaattcatctcgtaagcgcttgaggtgcagtagcaaatctccagatacgttgaacctgatcttgcggtcgatgattgcggctcctgaccatgtctttggggagcgtcagatggggagtgagaaagcgcccacacgctcggccattacaaaacagctgtctcaccttgatctccatatgctctccgcagagcaggaagagagccatgtcttcgactggaccagtttcccatgcgtagagctgagtcaggcgagtcttataagcaaagaacgctcgacggcccgcacatcacacgctcaaggcatacctttttcgactgcatgatcgtgaaatacactatatgattggcttcaaattcgctcattttcatgcggaaattgacagaactcggatgctaaataaggcatatctcagctcaaggcgtaacattgcttccatgttgctgcgaacttacgatactgatagcttgtccgccagtgagtgttttgagacctccagtatcgttgttcgttgtgaggattttggggtacagcccagcagccaaagtcgcggctaccagtttctcatcttctgcattctcgttataggccgcggggatgttgacgaacatagtgcggaaccccttgttgtatcttgctctgtagtgtagcagacacaaatcatagtataagttcagcgttacagcccgggaactgcatacgggtggccgagacgacctaccggctgatctcgtctttgtccgctttcgtagacggaacaaactgcgaatctatcaggtatctgttgcggccccaacggattcgtcaatagcgggttccacgagggatcagggtcctactcacgaatataattgctgtcgaagctcttcgatctgttgaagagtctgcgatttggacgggataagttcccagacggaatgtgtaggccacgatcaggacacacctgataagacaagaagtttcttcgacagaatgtcctcgcctggttcggattgaccgccgccatgcgtcgccaaatcgagaacacgttgacgatagtgaggaaatcgctgtttcctgaggaaagaaagcggcattatctcagtcgccagataaaacgaaacccggacaaagggagcctcacccgtcttgaaagacgacctaacactgtctgcttcagattcctgcccaaaaggagtgatgaagggtgacttggaattcaaggtggccgcaatcgttagggctggatcaagacatctgaagagggcggcgaacagcagaaatttccctattgagatagttgagcagcaatggcgtccgtgtcagcaatgaacttcaagcaatgtctgccatcgcgacatgctcaccaagatgtacatcaacgggcagcctgctaagtagcaaccccatcggtgtgatttgctcggtcgaagtcagagcgccaacttcgatgagcgaattgacagctctcgtgatgttgacaaggagaggaggatcgagagcccgcgacagtccttcagcgatcgtattgccgatcttcaccttcaaaatcttgatacgaagagcaaggtcttgcaaggacaaacgcaggatttcgggaaggggatgtccagccatctgcgtttacatctgattagtagccggttgacatccgtcaccatgttgacttcgcacatacctgagtgtcgtggcgcgcctttgtaaacagatggaaagctaagccttcttggacacgacccgcacgacctcgcctttgtgaggcattagatcgagcgatatatgtctcggtcaatcgcgagattgcacgcttctcatcataacgcatttctcgatgttttcccgaatcaatgacacacgtgatgtccgggatggtgacaccggtttctgcaagaacgccaggaattggtcaccgattcgcgcgccaaattccaattaggcttaccagcaatgttggtagctgatacgattgtcgtgaggaacgatgtcaatgtcggcgccacctgtcagaccctggcctggaactcacatagcacgatctttctcacaccctcgggaggaatgtcgaaaacagctccctgattttcggacgaaatactagaatgtagtgggtaaagtcggtaatcttgaggcataccgaacgacttgtgatcttgcaaaaggtcatgcagtttcctgatctcattgagaccgggtaagaagacgagaatggcttgagagtatggcgagttttgttcaagacagagctcttccagtagacggatgatgagttcgtacgggatctgcttggggtcgaggagattcacggtcttgacagtctcctggctgtataaagcggaggagagctgtttcggatctgcttgagcgggtgtttccccttcgtcatcgtcgtccaaagctggttcttccgcccattctagctgattgcggttttggcgacctaggcaaatttgggaagaatgctagcattagctccgtgttcgttaatgctttagtacgtatcctcagcatacccttgagcgcataaggagacttgtcggtgatcgcccagttggcgaattcaacagcatcctccagataggccactttcaccgggaacgtccttccaggtacctttagcactgggcagccaccgaagtattctgaaatcttctcgctctcgagcgtggctgacatgagcacgattttgaggtcgggccgctgctccatgagtgacctcaacacgattagtaggaaatcggaatcgatcgacctttcgtgcacttcgtcgacgatgatgtgctgccgagatccctagatatgagcagtcgcacaggaatggctcgggatgcatttgtgcttacggtaacttcatcgaatgtcgatcctcgaccctctgaaccgctagctccggcttccagcatcctcaaggcgataccattcgtgacgaaagccaatttctacacgtggtaaaaaaagtcagcgatggaagtctttcgcacatcagcaacactcaccgtgttcctcccgatcttgctttccaacctgatgctatatccgaccaggccaccatcatcaccggcagcgcccgcgtcaacgcccttgtctccaagctcccgagagactcgttctgccaaagagatcgccgaaatacgtctcggctctgtcacgtagatcttgcacggtagaccttgcgagagatgatcttcgaggatgaatgatggcaactgggtggatttcccgcaaccggtttctccactcagcaccaagacctggttgctcttcagtgtattcacgatctcctccctgaaagacgcgataggcagcgtctctcgttgttcctgtcattcgagaaccccacgttaaatctctctgtggaagaccaccgcgtgctcagaagcttgtgcagactcaccatcatctttttgtaagccgagctgtttgcccgcgcttgccacgagttcaatatccgctgatcaggctccgtcgatctcgtctgttgcccgttcgtcctctgctttttggctttgggtttcatggggccacctgctaccgactcgccgggcttgccgccctcctccagagttgcagtatccgtcaccagctcgtcgttcgagctgatcaacccgtccaacttccgccagacttgtcgattggccatgtcctcccaccccgttcggatctcttcgagctcgtcccagacatcacggtaggcaaggggcaggtacttcgaattgatcggtgggaactcgggtacccatagaggaacggccgcgttcaatggagacaggggttcgggcttgggctcgagctcttcggcaggtttggctgggtcggtaggtttgggctcggacagacgcgaaggatcggcagacgctggctcttccttggatgaacccgggacgacttttttctcctcgcagggcttgtccgactttgctgcgacgggagcaggagtaggaggtttagggggtctaggcaattcgatccccaacccggacgatttcgtctccaacatcaacgaatgcggagtagacgtcgtcagttcgtgcaagagaacgagggatacgtagttttccgcttcgacgagggtcgcacaccccgtcgtcgtcatctccagggaatacttgtatgtcggtttcacaggtgggggagctacagctacagcttctgcaggtgcaggtacagtaggagcggcggataaggagagtccggaaagaccttctgacagtcgagcgtcgggtgtttcaggccgactcgatgggggtccacgcggggtgctcgatccggatttcatcaccttcttgttcccttgccccttgaccggtttaccggccccaatctccggagaccactcgacctccaacttgacgcgtttcgctcgggatcccttggaaaggtccgtataatccaatttgacgatcgatagtctcggcgggatggtcctgagagctggatctttcatctgactcgccgaggccgctttcgtcttggtgttagcatagagccactcggagaggagctttttcggcatggtaaacgccgagggaagatgtttgggtacagagaggtcccggatcttgatggtcgtaccctccgcttcgtcctcgggtgatggtccggcgttgggatcaggtaggtccatcatattgccgaacaaccctccttcctcatcactccccgcatcgtcctgctcgtcagccttgacgtcagaggtcgtcggggaagtagcatcgtcccgagtgattctgttcttggtgcgagattcgttctcgacatcgctgccagagtcactctcgtcgcccttccggaacaagcccatgatggcagcagcagattgtccactgctcggatggtcctcgattcgagctcgtccgggtgatagcttgcgtggaagcgattttcaatcagtcgatgagccgatatggaaagttctcgttctctcctttacttcagctagttctaggtagaaagacgagcgatccgtaaatccagtcaacaacgatcgaatcgaatgccaactcctacaatccaaatcttgaactacttgagatatgacgattgctcgaaatgagtatattcaatttgtggtcgacgacgagtctcggttcaataataattaaaagtgggaaagtgatgatgaaacgaatcgatcagacataacacaaatgtatttatcaacacatcgtatcaatagcttaatagacccggtgcaccacgtcgttcagctgccatctgaggagtgccaggtatcatcgctctgcttgagtgattgcagatccaggtattgtagtattcgagcgatgctcgggccacgatggacgacacgggggattgcatacaggctgcgtctcgatccgacgacgagatcccgactgcctagtctcctccgacctcctaagagcgtgttcttatcaaacgtatgaatgcctgataacgagtcgcatccagtacctgtcatccatatagtagtcattattgataccacccctctcacggacatgttgaccggttgaacccgtcatgtccgcctttgcgctcgcttcggtttccggttaatcgcgtcaacggccgagtacccgaaattcagcagaggtacacccctcagaggtcattgctatggtatcatctagggaccagctaccaccactcaacatacaagatattaccaccaagataaccattcccacaccctcttccccatctgccttgcatactgtatccatagtaacacatacagacccactcctggcaccatggccaagcatatcacgctcaaggacgctctcaagacggagcggttgacgccgttcgggaatgccgtcgccggagcgatgggagccgtagtcagcagtgcgctcgtctaccctctcgatacgtcagtacagtcttctcccattgtgtatgatactcgctctggaagactcgggtgttgatacctgggcggttccataatatcacagcgtcaagacgcggatccaaggctcatcgacgacaggatcgagcacgacaaaggacatcgcggggcaggatagcaggaagaagagcaagaatgccatcctcgccgtcctcctgaaaacgtggaagaatgaaggtttggaaggattcttcagagggttcggagcgaacatgattagtacttttagcatgcgtgagtcatctcgggtcgttcgacaggtgccccttaaacgccagacctcgaagctgaactcgacttggatggatttcggccggaccggatgacccatgcacacagagtttgcctactttttcttccactcttctttgaggaccgccgttctcaaacgatccaaggtcaaatccctctctacgagcctcgaactcctactcggagctctggcaggagcgttagcccagatctttaccatccccgtagccgtcatcgctacccggcaacaactccatgagaggaccaaggggagcaacgtcagggatccgaccatgttcgataccgctcgtgacatcatcgacgaatccggcttgaccggtttgtggacaggattgaaaccggggttggtactcaccgtcaatccggcgatcacgtacggggtgttcgagaaactcaaggggatcgtactcgccgggcccatggcgcggggatcggactcggaagaggtactggtcaaggcgttgaacctcggaccagggtggagtttcttgttgggcatgacaagcaagacgttggccaccgtcgtcacgtacccttacatctttgtgagtcggaccctcgagttccggttcgaccccgctctctcgatgacccgcatccgaactgacatgttcccggttcatcggcggataccaaaaggccaaagtcaggttacaagcaaagtcgcccaagaccgacgagtcgagtccggcaccgacactagattccacgacgacgacctcgacctcgaactcgacatcaccacccggatcctttgccgatgtcgtcaaacacgaacccacgcatacacacggagaccatttcgtctctgccgctgatctcgaagcgaacaagaccgactcgacacccgtccatgacgacgccccgcggatagctgatgatcgatccgctaaagaagaggaacgcgtcagtccggcagatcaggagaagaacaggaagtttacctcggccgtcgagctcttgaagtatacctacgctaggcacggattcaaggggtggtatcagggcatgtcggcccagattctcaaagccgtcctgtcgcaaggtacgccccgctcgagcagccaacccgcgctcgcatccgtatggaagctaatgacgctctgatttcattcccggacgaccctcggtttcggatcaacagggatccttttcatgctcaaggatcagttcgagaggtacgctcttatcttgatgatcctggcgagacgcgcctgggctaggcgatgagccgggagcggacaagacaggagctgggctttgtatcgtatcggcgacagaccgaatgctgttgcccgcaggaatagacccctggggtgtgtgggtcgatcgatgtattggtgttatgaacatacagtagcataattatacggaaaacagaccgagacaagcctgattatggaatcagagcccggatgtagaaagacatctcaagcattgcacggcgcgattggccgtctatcacagcggtgttgcgtggtgattggcggcattaatgaatgtatcggagtgctagccaaagcctgtagaaacgtagaatcgtaagcatcacataaacgagctgaagtggcgggaagcactcacgcgacccggtagatgaccatgataccaaccaggatgccagcttcaagcgcaatcaatcagatcgcacgtcagcgccggacgataatatcgtttcaggcaaagaggcgctcaccccaagcaccgtagtcgatatccccaatgtgcaaagtatcgaggacgtcttgtccgaggaccgcgccgcttccgaccgacgaaggataagggcaacccgatgtatcacactgaaactcgagaccgcgtagatcagagtttgccagcagctcgaaggcgtatttctggtagtccatcctggaaatggtattcgagcattaggatgatgggaagtgggaaaatcgcagcacgatcaggctgcccaccaatggaaggaatagtaccagaagcgcggcaagttgatggcccggatactgttgacgtcggataatcagctctgcaacgcacgctggaaaggcgacgatttgcagtgcacggctactcacaaatagcctgcgacgctcatccagaatccattcaaaaatgcagagatcgccaaagcggccacaaagatgggcaacaacgccgcgactaccaaaacctgactttcggccacatagatggataggaagaggaaaccgatgtatcgcagcacagcaggggcggtgttttgtaggccctattaatatggcgcggtcggttagcccaaggtcccgcggtgctcgacaaacgactcacaatgccccagtacatgatgagaacgaacagcgtcgaacatgcaaacaggaacgggatggtcacgatcgaattggcgaggacgaaaggcaaggcgccatagaggccattggcggtctctttctcgaaattcgcgcgttcctccaggactacatgaccatcttcaacattttcacaccaattgcgacacttgagctcctcactcacatcctgggattccagctacggacactgatcatggccaaaactttcagccaacctgaggactgaggcgcataggcgtggaatactcactgaaagcaagaaaggccaccgagtagaagtggacggaaagccgatcattgatggtgctagcctgattgcccaatcttatccagatggtggcaagcataagtcccatacctgcaaagatgacggtagagaggttatctcagttgcctagaatcgtcacagaccgaaaatggcctgtactaacctgcgtacatggcgccacgaataccataggcaaggaggttgctgtcgagccgtgttgtaagctctcggcactcgtgccatacaaccgtcgaccgatggtgctcaccgagagtaactcaacgtcatccgtcgagataggatgaccgtgtgatatcgaattttggcgacctcgcccagctcggtggatcgcaactcttcaagcggattaccggccgggtcgccgtgatgaccgacgtcggtcgcaaagccgcgagatctccactcgaggtagtaatttcggaactgctgaatagtatcgcggccaccctcatcggctgtccttgtcgatcctccaaagtccgtgttcaatagctgcatggcgatatccgtcggcgggacctgtgcacaagtttcaagcatgactcagccacgtggccaacgccagagtcggatccagacccgcacgactgacaaatggtggcgattccgctccaacttcagagaggaatgcgtccaacttgctgacgggaccgtgataacacaccgagcccctcgagagtagcaatagatcggtaaattcgttgagggtcgaatacgaaggttgatggatgctggcaaggaccatgatcccttctttgcgggccaaagcagcgacgcaggaaacgacctctttggcagcggtagagtcgagctgtaaagcaaagaggaactttttcaagcgagtgtgtagaggaaatgggcaaagccgagactcacgcctgaagtcggttcgtccagatatagaatacgtctgcgggcgtaatactgttagacggtcatttctgctttgcatagccgaacctatcacctgatacctacgggtaggtgaccaagctgcaaccgatactgacccgacgcttctgtccaccactgagacccctcttgtacggagtaccgataggtaaatcggcacaggcctcgagacccagtatggcgatgacgctatacacacggctgtcgatgtgctgggcagtagcagttggcgaggacagttccaaggcgtatcgcagggtctcgcgcgcggtcaaggtgccaagtagagcgtcttcttgctcgacgaaagaactaaccagccgtgagaccgttgcgtccggtatcagcattcgggtgtgtgaggagtcaaggagcccagtaggctcacgatagaatcttcatatccttgtccgatacttgatggccgttgagggtgacatgtccgccagcatccagccgcttccttccgctaagaagatcaagcaaggtagattttcctgtttgaaggagggctctcagcttttctcttcatctctttgcggggtgccggtcacttaccagcgcctgacggtcccataatagctgtcaagcgattttgtcgtcaatgcatgtctactatccttcttcagtatttcccgactctcacctagcatctctcctgccctgatagagaaggatacatcgtcgacgagtaccttggggctgcctttctttaccttcacagtatagctcaagtttgagaattcgagtacagacgacgcgtgtgtggacctggtaagaggttctagccccatagggatggaaggcgctccgaaaggccacatgttggcgattgcgtagatatagacagatttgtaagttgttttcggattcgagcttgattgcgacagtcaatgatcgattgtaccgtctggtaagtgaatttttgttggtggaatgacagggtagctttcgatacaccacgcacaaaattccacactcctttcatcccccttatataacattgtccctgatcatgagcttgaggtggcgatggtgcaaatatgctgatccaccgaatctgctgatctagatcttctgcgcgccagacaatacgatgaaaggatgattcggaaacaccggaggctgattcggaagcggatgaataagatttgcgtcacgtgatgttcaagtcccttgaaaaccgcgtcatctgatgatcaccggcgtttgaaacgctaattgacgatccgaatcccgcgaacatatagttctgtcgttccgaatgaattgcgtctgcatctgctgacgacctcggaacgcttactaagcgtatgtttccgatacatacaccttacgcatctttcaggtcgtgagactccttccgatactagcctcacgatccgtgccggcggggatcgattgcgtcggccgttgacgaggcgatctgtatgggcttcttcacgatctttaccatatccagcgaaaacacacgagtctgctaggactctaaactccgatgacgtagtgactcttacacatcatatcttgagagcgtcagacacaggtcgaatcaaccgcagcggacgaaggggatcgctggacacatctcgctcgccactgcttcgctcttagtcgcatctcgcaagaaataccacatcggcccaacggcttggccggtgggagaattgttttcaaatcttccgagactggtcatttcgttcgcttagtttgcgctgaacactattgaacgggttcgagcgcattgcgattgcgggaaacagatatcaaacgcgcgtgggactaaaatcgatacatggaagggcaacttccgcgcagccttcttaatttctatcgccgagcttcagcatttctttgcttgatctaaacaccctatccatctgactgctattacgaccaacacctggccgatggtctgagtggggtccgtgtctgcttggcagttttctttttgtaagcgaaacagtaagttcggtttctgaatcctttgtggagaattataaactcgatggtcttgcatccgaacgagatgagaagacgagaattggcccactggttaggcgtgatgtgatgttttcgcatatgcaacagtgatgccagctcgaagacatatatggtcatgtctgctgctcttcattcgccaccgcgaccttgcttgcctaacaagccgtttcagtctgcgttggtgaaaccttggcagtctacaagcaggactctgccatcttcacgaggcgcctcgaatcgtcgctctgagtagcaacgcggggagatctgtcgcctcgcggccattggcttggtccaatttttggaagatctgggcatgagtgacgccttcacaactgatccgggtctaatcggagcggagcgggatcgggaactttgagctcgatggcctgcggacacgtgaccggcaagtcctcgttgtcggagcgatcgggtcgagattgtgggtgaaacgggtgtgctgggatacgtttgcaaaatcgctcggccccgctgcacgcaatccgccaagaacgcaagaactcaccgtgatcggggatattctgccatgctcaaggtttgcacacatttcagatcccgttcacgtgagagaatccaccctcgggatcacatgagtgatgcagaaaataccaccgtcgggtatcaacgaaccgatagcctgccgagatctgtccgatgaatttccatgcgctattcatccggcctctcaacaaaagtgtgcccctgatcatcgcgcggcgaaaagatgtctttgatcatcttgattgggtcgcgcgtgtgagtggtttagcgtcattggcccctcacctctccagcctcttggacggtcgatccacctccacaattccggtgacttgacagcatgacacgaccatatccgctggcgaagcaaactctatgagatttattacgaagccctgtcagccctgacaagcccagggtccctgggaagtctgccagaatcacacgctcgtcgtcgggtatttctcacttaccgcacaacagccttggccggccccccgaaagagggtatctcaccttccccacgtctggtcttttggcgagtcaagagagatcttggagacgccgagcatgtctcggccatggcccaatttttattgtgatcgaatggctgtcgatttccccagactttcccccttcccggacgttcatgaccaaggaataaagattgttgtgttattcttgtcctcgcatgggttgtcgggagacgaccatctccgggattgtaccgaatacgtaccaatatgggaccaagttcggtgagacacaaaacttatcgggagttgtcctgatccatctgaaactaccgtgtcagtggatccacttctcggtgaaccggaccggccgggcatcgaaatgtatcgtccgaaattgctagctcccaagctagaacatgggcttctggctcgtgcgagcgttgggaagacgagaacctagtagctgattagcctcccgcactatctcaacgctagcaagtgagaggtccacatcgccctttgcgaagctgcgagacaaaaagcatcatcaaagtgtcgtcttcgtcgacgtgtctgcccgacatctactctggggtaaccccagagcgaaagacgtatgtccaagcgaaagcgagcccgagcggcatcagatgatgggtacgaaaccctggctcgcagcctgtttgaactattgttggcatagcccgggagcaagagtaaggggcgttttacccttccggaaaaccgccggtggaccctgaagcggtggatctatgggttttacctagcgaaaccgccgagcagcgttagacgacgcgcggggaggtcggggtaggcgagcgatcggcgaccgaagcgtggctagttgttacccttgtttgcctattgagcgtgttctcgtgtggtacattcgctacgtgtcggttgtttgcgcgttggcgacggcccggaggaggtggctgtactcgacccatgtcggcaccccgctccgtcgggagagtttgcccttgactcgaaggtcgtctctcccggggatacacaaacgggtcgccgacgctcacgatggactgtcgtcgtggtcttcgtcagcatcccactttccccccgctcgctcgctcgccgcagcatccgtagaccgagattttgacgcaagcaaggagcaaccacggactcttttactcccgcgatcgctcgctcgctgacttggccctcgaatccaccaccactaacaccgcgctcagattccaaggaaactgacgatcgacgagctcgccctccgccctccgtgccgccccgatccaccgttggaccgagagcggccgtcgactaacctatcactcttgtttgagccccgcctgcgaaaacccatcggatccttgccaacacacaggtcgttcgctccgtcactcaccggcagactgtgctttaccgatcgcaggagactctcaactacggccgtcaataccaaggatcaaataccagactctagtcagcgagacgggcatccgtgtgttttttcgccgatcccgactgtctctttgcttcacctttgaacccatcatacgtctgtcaccgccaaactccatcacacttccgaccccgtcagattttggatggcgaccgatacccacactcacacaagcaatagatatatatccctgtgatatccccaaccatcaaccccatcttcccgatcccggtacttaggagaattaaatcatctgaactttccacacgccacatcatacgtactggcaaacgtcatacgatccggaaccaccttgtaatcaccttttgtcagccaggatcgtcagccaccacaccaccaccaccgacaataccactacttgcaatcagaggatagaaagaccaagaacaaggagtattgccgtataatttaggatcgagttgaactttgggtgtttcactctcaaaggttagtctagtttcgcacgccttggttcggcttctagactgggtcgtccgtcgtgaaacgtgatgagaggggggtaccaaaggatggcaaaagcggcaagggaggtctagaaggcggtgctcgatcaaaacgtatcacttgactcgtcagggtcgagtgatcacgggtcaagggtcaagtggcaagggggagcaggaggggcagcaaacctgcgatcaggtcagatcagtgatcaagagtgatccagttcgaaacacggccgggccggggatacccaaaagggagatcgaatggtcgaagcgataatcattccaaaggatggttcgatggcgacaacagggcgaaaactcggtgacatccaccttcgaggtcccccgagtcaatcgactcgaccggactcgtcgggcaagtgatcacgaaacgggggcgaggtcgatctggacaacgtgtgtcccaagttctcaaggaacgggtcgcgggtcgtcgccctcgccgtgagatacggacgagcttgggttgggtagaagagggatggatgatcatcgcttcgagccatcgtacggcgacggcagcggcggggaacacgatcgaccccgagccatccacgcgtacaccttcttgcctcttgcttgcttgcttgcttgcaaacacacacacacacacacacacacacccatatctatcacaccatccacactcgacctatccactgcgattttcctccttgccattctcggtcttgcagctatcccgttcgccggagtattctccgccgagttgggatatatacctgcgatcgatcgcctctccagtccatcgtcctctagcacagccagatatatcacgtactgttatcggcgacaagatggctgacgttcgttttgcccctgtatcccgtctcctctctcgtcaacctacgcaaccacgtcgaccttctgcacgcacgtcgtctactttacttgaaccatcggccaccttgcaatctcgtccaccttatcgatcccgctcgatctcatcctcgaccacctcgacacctcgattaccaacctcgaaccgatcgacgccttatccttcaccgacatcccgacttcgttatcgtcgtatcttgcctcgtcaaccggacctctctcaacaaccgtcacccgcactcgacacgttgatcgactcgctcaatcaatcccgtcttcataatcaacaacaacctcgacgcgcccgtcctttcccgcctcgcccacccacagccgcgacacctgccatcaccatcaccacttctacccacactaccactaccatcaagtcgaaagacaagatggcttccacctctatgcacgccggtcaggccgtgccttcttcgtctcaggagcatgtcaaggtcaagcaggaggagggctacgaggcttcttcatcatcgcaaaagatggacaagaagcccgtcgtcaaggatccttaccatggacacgaagagacggccaagatgtctgcacgattcgtaagcgtcgatgtaggcaatttcaaagcgaagcgacgtgcttactcatccttttgcctcgacgatagatcatctccctcttcaactgccccgtgatccctcctcagactggacccaacagtcctcagcctcctttggctcactttatcgccgtgagtcatcggcacttcgtctcataacctatacgcaaacatcttacgctctcttcgacctcttccagtatgctctccaccgaacgcgactgcctcactttgtcaccctcgtcggtctgctcctgctgcaacgcctcaaggctcgatacccctctgcacgaggatcttccggccaccgactgttcatctcggcattcatgatcgccagcaagatcgtctgcgatgacacctactcgaaccagagttggtgcatcgtcgctcagaagatgttcacactcaaggagatgaaccagatggagcgggagatgtgtggatacttggagtggaacttggtgagtccggggaatcgacgaggtctttacgcgcatccaaagcttaccagactcgtcgatttagaatgcatcctccagcgagatcgacgcctttgaggccaaggtcaaggctgaccactcatccgtcgcctacaacgcacgcaaggctgccatcaaggctcagcaagccgcccagcaggtcgagttggctcgacgggaacaggagcaacagatgatgcagatgcaacaacagcgaccatcgtcttcgggtcctcgacccatgagcggcatcgacagcgcttcggcacagagggtcaccgccgccttgccccagcgaacacctttcaccaaggcatgggcatcgcggccaccatcgatgacggctgtcaactcgacagcatcctcatcttcctcgagcgccacggcatcgtcgtcttcgcgacgactggccacgccgttgacgggctcgacgccatcaccgaccgccatcccggctcaaacgtcgtcacaccagccttttcatcaacgtgctcctcctacccgggtggcgagcacttcaagcgtccccactcagacaatgttgtcttcctctgtcaacagcctgtcgaacgccggctcgaccatgcaatctcaccatcgactgcatacggccgatgtaccgacgtttcacccgggttcgaccgttcccgttgtcggtaacagtccgttgaccaacggtcgccgaggatccaaggctggcctcgccgggcccaatggcaagctgacctcggccagtcggtcgagttccggttggagcctgaacatgctgaacggcagcgtcggcaacaatgggctcaagcgagacgagacgcattttaggtctggggagttggcgagatcgggttccggcgccgggacttatgtaaacacgttgagcgggaggcaatacggtctgaccgggtgcgacgatgcggacgaggacgacattgacgcttcgggagacgcgcctagatatgccatggccgtctcccctggtcccgtcatgaacgacagcatccattcgctatcgaccacctggccgaggaccatgatggacaggcagaccggcgcacctctgcggccaatgtcaaaccatcagctccaggcgcctcccatgcggacctcgcgacgtcagcattttcgtgacgtccagtcccacccgggctcgccaggctcttcaacatcacatctgcacaactccccccacccctcgttgaccaacgatagcagcaaccagtctagcccagacagccaagtctgtcggacgcctagcccggtcgcttcgattcgcaggccgacgcatgagaggtcattctcatcctcgatgaccgtacggggcgcttcaaagcccatggtcattcagggcgcacatcagcgatacggcatggcggtcgagtgatgcttcgctcatcgctggcttccacgtccgtcatcggtccaccattcatcatcacatcatatcatacaccacgcgtcggcttcggacaatacctccagtttggcaatctcaacgacaccatctcagcacaccacttctcacgattttcacacgcaacaacgtaattttccgtttttagaaaagaaaccaacaggtcgaaacgcctcgtttacagcatagtcgatatacctcgtaggaaattcgcacaaactctgtaatgctactattaatttgtactctagggacggctcttcgatcccatgcacccatcgaatatactacatttcgtatagatagctttgcttcgccgtaccgagattcaatcgctactagacagttaggaaaggaaaactttaagcgatccgtggatgcttctcacgcgtcgtgccatttgggttcgaggcgaccgacacgtgatcacgttttgaattcagagctctgacgtgggtcggcccgatctggacgcggcgcgctcgcgggactcgtccacgcaatcacatctcggtgccgctgacgtctcaaaatgtgcgatcgtggctgacgtgaaagtcgggatcgagctcttctgctcccgggtcggccaacaccaactcgttcgtacgaacgtccggtccggaacgaccgtgtgcgtgcgtgtgtacctttcccattggcgggtgcgggagccgttatcaggaaagcgcctgacccagggatccccggaggtgtattgtgtgaacaggtccatccgcgccatcgactcgctgagtaccggcggctcagcgacgacgtcaataataggttaccggccgtgtgaatcgaggcgagtcacctacgagacgagactccggacatgcaacatgtccgaagcggtgtcctcgttcgatggcgtcagcaaactgttcggattccagaagttccaggatgcagattcacgttaggggcccgcaacgggacctactcggtgccaagtttcgccacggcccgtcatatgttctagctcgtgagatattgaagaccgatgaacctgattcgtattgtccgattcagcgcttacggagttcggtggcatgtcgccgcgacaactccatgagccgagcttgaccgtgtaacggattgcgttcgggtcgatgcctgccgctagactccttcgctcgatgttcatggcggggatcacgtctcaaatgatccccttgtggagcagtcgcatcaatcggaccactcttcgaggtcatccaccaagtatgaccgtgtacaaccgaagtgagcaggggcagatcgagcctcgttccacccttgtatcttctcgcccctcgttgcacgtcgcaaaatgtcgcgatttaggttctcattacgccacgctgcatcaacaaggcgcacatcgatataattaggtatcgcgatgcgcttccctttgtagtatcgggtggcgatttaattgtggctttgatgacatcgtgttttgatgaagaagctaaacacctgaaatgaaagaccgttgggccagtgtcgttcgcctgagaccgccagtataataacacggatggtacagcactgaaagttttctctcctttgtacttagaaacgatccttcacgaggccggcatagtactgcttccgtaactcttcagcgacctgtagaacgtgcccctttgccaggccaagatacacctggtagacgttgatttacgcgatagcgctgttaagacacgccactcaaaggataacattgatgaattgtcgacccgcaactgtaccccaacagtcttatcaggcaaagggtggtccagcttcgaaagagctatatatggaagagcgacatccagcgatttcctgattgaatcgaagtcgcctttcctgaggatcaccttcgcacactttacagccctccacaactcaagaacgttcagtaatggctcagagactcacatttgaacagttcatgaacttgccttttgaacggcgactggcggaagcgatacaggggcatgaaagagtggcacagctcctggcccctccgaaccccagactggggtcagatgatcatctcaagatggtcaaggaaagggtacgcaaagctctcgctacttatcgacccgtccggacgttctgacctgcggcgatcccttcagagtcagagacagctcagggaactagtgtgtttacttctttctcatctccgatagccatccagtggaacttattcgaacgcacatccttaaattaccatgcggcagacaaaggctatgaccgattcacagttgagcgagttcattgcaggcgagccgagtaatacgaatttgaggggactagtatgtttgcctattttccatctccgatagccaccgagtgcaacttatccgaccacatactctcgatttattgtaccgcagacgaacgctatgactggtgcagagttgagcgaatttgtggccagcgggtttgcacccagtactgaggctgcccccagccagagcgcacctcaaccgagcggcaactagttcccggttcccttgtatcggtagatctccgagattctctaggtaaagatttacgagtaggatgaatcggtggtactgagcggttgaaatcaacctttacgacagaagatgagatgtaatgtttgctgcaaccaagcaagacgtgtatctctcgagctctagagccgttgctactgcgcctgagacaggcgcgacgtgaaaacataaacgagggtgtcgaacaggtgaccttgatctccgttcccaaatattcgaccgaaaattctagtacaagcacgtgcaggttttggcaacgacgtgatcgctacacaatatacaacatgcaacaaggcgagccgcattatacctctttctgatgaggtcacgagaagtcggctgattggcctcctttgagaccgccttgatcctcccaaaccgagaagcttctgacgacggctcgacctggcgtgtgcgaataggctaacgatctgacgagccatagcgtaactttctttgtcctggctcacgagcacggtccgcatgcgccagaatgtcaagggtatgctcgtacaagtggcatcgacccttgaccttgcccagaggttggcagcagaattgtcaagtcacgtgcgttggggttcccaagcctcacgttgatagataaagcgtctgtgtactcgtacgatcgtcccagagacaagcgcttactcaatttggaaaggcaagatactatgggaaaagagggagatatcatactgcgagcctgtattgcctaagagatcgcgtccgatggtggtcagctctgccagtacgttttaccgatcaggtcacggtcagtcgaaaacagcgtttatttgaggcgagctaaagcctctggtcgcaagacttccgaggctagggttcatctacatgcgaagcactatgtagccggtctcagagggcgctgatatcatgccaaacgtcgcagaaagtgccatacacaccatattggtactcggaatcccatatcgggcgttcggattgaatagaagtgagaaactctaaatctatgtctcgacgggccatcttttggtctctctcctgggtccactaaaacgaaccggtccatgatgatttagtctgatgatacgttgatacagtaatgagatatttcgtttccgaccgtcaaatcgtctttgcacgaaaagcaacacgcgtcagcccaggacacgtcagattcgctcactccagacgtaccgctcgagtctaccacgtcgagtccctgtcgtttacttttcttgcgagggcttgccgccatgggtcaagagctgatacagaccgacttggatgtttagagcacggattaaaggatatgatgacatcccggtactaacccagtctagcccttcttcccatcctcccttttcgccaatgacctctaggcactacagagtgtcatcattagcatcgttcacaaacctgcgctgagcagggcgaggccaaacggaacttaccttcaacaccctctcttcctcgtaccctaatcgtgacaacacgccaaagttgatgtagagcttgagcaaggtcttttccttttcctgttgcgacgtcggtgctttgagcggttcagcagctggcacgtaaccggaaaatcgtggtaagcacaactctgtgctttcggtcatggatgcgatgggctcacgtctccggatggtcgtcttgtctagctcgagcagctcttcttgcagcgattcctcaaggttgagggtgatgtaccctttattcatgcgccgatcaaagtctatggcctgcgatacgcttgattagtaacaacattcctgacggaacaaggaaatcggaacgtaccttgatgatccggttgatctccttttctcccttttcctgcagtcgctcgacgtatccctggtaaatcccttcctcgaggtcgaattcgttctcccaatcatcttgtccggcagcggagttcaccactgctccgttctttgcacctgtactgttcatgctgccggccgggtttccatccttctggttgatctcggggacgaccgattcttcagcttctggcggttcttcgacaacaggcaccggctttttgggctgagaggtcgttgcgaatcctcggttgacgggtgcgagtcccttcttctttttcgccatgatttcagcttgcggtcaggcgttgatgtctgagcagtgattaaggattcgaagcgtaaagtaggacaacaagcagttcatacatcaaggtgaatgaccatttcgatctaggtgcggcttcacaccgagtttccctatctttcgtcagatttagttccgatcattcgatcacgtaaaagggaaattgcccccgatgaccagggcgaggatctctagtcatcttgtacgggtataagggatagcaagacattgctgtatgatacatctccctcaaccgtcgttcataatttatcacgctccaaaagccgcttccaacgcgcttcgttccgccagacttcctcgaggctcccatgcaaagctctcgacctgcttcttgacctgagccgcgccacctgggactccccatccgcctcctccaggcgtgttcaagaccagtcgatccccagccttgaaggccacggtcgccttgcctcccaagttcctctcccgcttgaccgtctcttccttgccgtccaccgtcctcttcttcgatgtgacgtgcaggttgagcccgctttgcccatcatctccgcctgccataccgtaaggctgtcgagctcgtctttcggtcaacagcgagacttcgatcggctgcaggaattccatctcgcggatgacgccatcgccaccgttgtagagccccttgcctccggaattgggtcggtacccaaactgatgcaagatcacggctatgggcggcgcagtcatcagcttgagatgttcgagtggtcgcgatgtttcatgctcagcttacggtatcgcctttccaggatctcggggtcggtaatccgcgtgttggtcatgtgcacgtgaacgcccgaagtcccatgccaattaggtccagcaccgctacctcccgcgatagtctgtcacgccacgtctatcagcgattggagccgggaatgtgctcgacctgacggtaatcacctcgtagtatccccatccacgggaaaccttgcccgtctccttgtccttcccgcctgtcccgaaagaaagactgtccgtccatccccatcagcccgcatatatcatgcagttggtcgatctctgccgtcccgactcacttgttacaacaaccctgactagctgcacaggcttggaacgctttcagacagacgtccgtgatcctttgagaagtcaacacgttgcccgcacagacggccgcttcaggggaaggggagaggagagagttctcagggatgatgactgatagacgaggaagcagcatcagtgatcagccacgggttgttcatcgaaagtgcttgctttcaggcacttactcttgagaggaaccaggcagcctgcattcaaggggatatcttgatcgaccatcgctcgcatgctagaaccgctcacgtcgccgaagatcagctcctctccatcccctctcaaggtgaaatgcgcagatactgaccaataaatgatcgcactatgcacgaccgagatcggagcattccaattcccccggacctctggccccgtccccgagaaatcaaaagtcgcgtcccccgtcttttcgtcgatcgtcactttgagggcgatcggggatccatcgtccatatagtcgatagcctggtattagggtgcggcagaatcccacggtttatcagcgaaacgctgggatcgtgcgagatgagatgactggggcgtgcgacgtaccgagagggtatcggtctgcgctagccgagccgcagcgatcagcatcttcctcaccgctgtttcggcgttactactcgatccatacggcaactcttggtcagcctgctcatctagttttctctcttgcgcgatatggggagagagcgagactggcaattgccgacgggacgtatgggcttactctcgaatatgcttcatgtacgcatggaccgtctcgaggtcgtactctgcgatgagggcgtgcagcaactggatccccttgaaattggctgcgatttgctgcaaaatgaccggtcaccaaaccaacgacaagattgacgattttagcatccaccttgctcgaaccagctgatcttgtagccgcggggggactcaccgccttgatatcgctctcgacgctcctgaaatctctacatccggaacacccttccaccttacccggctcatccaccatgatcttgtacagcccgtccctatcgaatttgcctccggtgacaagcttgaaactgatgatctcggctccctcttggtcgagagaggtactatagctgggcatgctccccggttgggcacctccgatgtcggcgtggtgtccacgggaggcggtaaagaagatgatctcttgctgtccctccgcgtcgtccggtgatgaagaagtcgaaggggatgcgaagacgggagtgatgacggtgagatcggggagatgtgatcctcctgccacaggagagttggcgagcaggacatcccccggcttcaaagacggtccgaggagatctagctgatacttgatagcaaaagacatcgatcctagatgtactggaatgaacggtgcgttggcctgcgcgacatcaggcaaggatcaagtcagccggaacggtaaacgccgggacggaagtcgtcgactcacgacgaggtccccattcgcgctgaacagggcgcaactataatcaagcctctccttgatgttcgtcgatatcgaggtctgttgaagcgctctccccatcgcctcggcgaccgacatgaatcggttcgagctgtcagaggttcaggagatagttgcctgagctcgtcgagcgcggggtttacgggcggtactttgcaagactcacaagagcgacaggaggatcggatcaaagtccggtttatcggtggtgtcagcagtcatggcgtggtaccgtataattgatacaaggctatcgtattgaacgcttggcgaggttgattgcttatactaccacggtacgtataagtacctggccatagctgatggaacgatgtacgatgcatgatatctgagcgggaacactccggaatggaggtttcggaagtaaattcgtcaccggaaactcataggaaacaggttacggaagcaaattacatagacactcacacccctgtacacctacctgactaacctatatacagtagtacttaccgtgcacattccttatcccgtctgaccacttgcttgagagaagagtgaagcgctcgacgtataggtcctcagacgagatgcccgaaaacgctgcacaaaacgtctcggaccattcgatccggataagtatcgatagggtatgttctacatctcggtatactccgaccgcatgcgtatgatggctcacttgcttactctcatccttcatacagggtggtacctttacggatgtctttgtgtgagtcagaacatagtgtttctcgatgagcaatgttgctcacgaatgtacgcatcgcaattgtaggtcctacttggagacgcacgattcgtcgacccgaaaagagttcatcctcaagctcctctcatccgacccgtccaactacccagatgcacctacaggtcggtctcttcttgcaggcactttccatcccgattcggaacaccaagctgatccctcgtaatcgttagagggcatcagacgagcattggagaaacgtaccggacggtcgttcccgcgaggtttacccctgccaactgacaagataggcgagtctgcgcatctattcgatatttatgccagggaccgatctgaccgacaatcaacccttcattccccatataccagaattcgtgaggctcagtacgactgtcgcgaccaacgctttgctggagcgaaagggagagaaacacgccttgctcataacgttcgtctcttccatgccgccccccatctcgcgaacgaagcatcgcatctgacacgcactcgacccaactcgataggcggggtttcaaggacctcttgagtatcgggaatcaatcccgcccccggatctttgacctgaacattaaacgcccttctccgctctacacggacgtcgtcgaggtagacgaaagggtgactctggtcgggtatacctcggacccggaattcgctcaacatgcgattcaatttgatggaaacggtactatcgagaaaggttacacgggagtcggatcgcagcatcagaagaccggcgtggagggagagggcgagacggaaatggagatcgtccgaggggtgagcggggaagccgtccacatcctccaacatctcgacgaggagcaagtccacacccagctcgtctcgttgtacgaacaagggtatcgctccatcgccgtcgtgctcgcccattcgtacactttccctcgacacgaactcgtcatcggagatctagcccgaaaagtcgggttcgaacacatctcgttgtcctcgcagttggttcctatgatcaagatggtgccccggggcatctcctcgacggcggacgcttatctgactccggtattgggggcgtacttggacgggttttattccgggtttgagggaggtcgggaaggtggcttaaaagtcgaatttatgggaagtgatggaggactgtgcgatctcaaggttggtctcggtggtccgactcgtatccctgcccggaactgactcgtcgtgccgttcgggtttcccgcagaatttttccggcctcaagagtatcttgtcaggtccagcaggtggggttgtaggttccgcactcacgagttgggaccaagccaatccgtcaccggtaatcgggtaggtctagtcaatgttcagacagtcgttctagccattgatccccgtcgacgcgacaggttcgatgtcggaggcacttcgacagatgtcagtcgattcgatggcaagtacgagattgtctacgagacgaccacagcggggatcagcattcagagtccgcaactggatatcaacacggtgcgttttacgagcaagatcacaacgaggcggcagcatattcatccctcctcgttgtctgcaattggtaggtggcagcgggaggaggttcctgcctcactttccgtaacggcatgtttcaagcgggtccggagagcgccggcgctcatcccggaccggcttgctatcgaaaaggagggccgttggcgttgacggatggcaacctctttctcggacggctcgtaccgaaatagtaagtcacatgtttgagatggccaagagggtcatgtcgctaagcagacagcacggcagtttccccaaatgtttcggtccgaacgagaacgagccgttggatcccgcggcatccgagagcgctttcaaagagttgctagagactgtccgagcagagaccaaatcagacatgacgctcgacgagatggtctacgggttcgtcaccgtcgccaacgagacgatggcccgacccattcgaacgctgacagaggcgcggggatatgcgacggccaagcatgtgtgagtccgtgacgtgaatgcattgatctgttcgtggagacctactttcatgctctcaacaggctctcctcgtttggaggtgctggcggacaacacgcctgcgagattgcagagaacctcggtatcactcggattctcatccaccgctactcttccatcctgtcggcatatggcctcgcgctagctgaacgagtctacgagacgcaggaaccgagttcgacggcttacaatacgagttcgatccctggcctgacaagaaccttggacagactcggcgagggcgtctctaccgaacttcgccgtcaaggattccccgaggacaagatccggttggatcgcatgttgaacatgcgattcgatggcacggacacggcgttgatgatctcggcagaagacgatacgacgttcgaggcgcgcttcaaggcggcctacaaggagcagttcgggttcgtgctcgatacgccggtcgttgtggatgacgtcaaggtgagtgcgagtcgacgaggacgctcttgacggatacgacactgagatcgctggcgtccaggtcaaaggtgtaggaaagacttttgacgaccttggcgaatccgtctttgccgaatttgcccgtttgaacatgcgcaaagtggaatgtacgccaggatcgaccaaggtggacagtttccagtcggtctacgtctcggcaccaggatcgacaaaaggtcgtcgtcaagaggtgccggtgtttgagctcgaatcgctagaggtgggcgatctggtcgagggtccggcactgattattgacgagactcagacggtatttatcaacctgtgagtgctggacggcaccggcctcttgatgtggacagcaactgacgtcgacttgcggactcgaaagggcgtggtctgccaatgtcacgtccaggcacttgtacattacgcgggaatgaggatgctgacgagggcatgagattctggcgagcgggacattgaacgccgacgattgcgatagaatgatgatacacattatacgctacaccaagaggtgacgataggaattatgtgaaaagacgaatgaagagcgtaaccgaggtaccggaccgatgtggggttgctcagggagagacaaaggtggcttcgttgaacaaccaacctttgacgggtaccgactcttcggtccctgtggcaatgttcagggtggccgggttgtggtactgcaaaacgagaccaaccagccatgtcaacacggctgacgaggagatgaacacggtcgcgcgtgctcacctgaaagatgtaaggcttggtaccggtgatcgagctcagtgcctttctgacgaggtaaggaatctcgttcaacacgttgacctaaaagttgggcacgcacgacgacgggtcagcatgatcgacacgcaaaggaatggcgggactaccgttctcgcgactcggtctcaccttttcgatcaacccgcccttgccctcctcgacgctggtttcgacctcgaggctagccttgacctggttctctgggtgaccgatctgcttgccgacccactcgaacctcaaccccgtaggtccgtcgtaaccggtctcggcgtccttggccgtcgacgtatgcgtcgccctgcagatatcacccgacgtgacgggctcgggcttggtagctccatagatggcggcggcgtcgtcgggtcccgtctggctgcagacgaccaggggttgaccgagcttggaagagtagatgcatccgatgttggacttgactcgacccgacttggcgcccttggctccgtaattgtcaggggtctcgaattccatctggatggccctaacgcttccgagcttttcatcctcggatccctgggtggtcgtaaagaatgcaaagttccacctcgaggcgacctgggcgaggtcggggtcggggtcagccaatcgtcgaatcggcggctgtcgacatcgggtcgcgatggactcacagcatccggtctgagaccctggatggcggcgacaaacatggcttcgcccttggcgtcaatgacctgtccatcgatcatgatctgtcccgacgactggacgtgagggtggaatcggctacgacgcagacgacgcatcagcgacttcggtcacacaacacagctggccgggggagggcggggcgcttcggggactcactggatgacgaatccgtcgtcccccatgttcttgccaaacctcgagtaaccaccttcttccccctttccgagcttgaacccgggtgcgccttcgggcctgacgaggttcaagctcaacgtggtcgtcttgtccaattgagcgtggatggtataggtctcgcttcccgcggccgtaccggtatgtttgatctcctatcaagtgtcgatcgatcggatccatcagcctcgacgcggcccccgaccgccctctctactcgtatgtacgtacgtattcgttggtcttgcaactcctaccatccttgggatcgacggtgaaccccgtcgcgctcagactcctccagaccgtcttcttggtggtcgggttgtagagcttgaatgtcatctgggtttgagcggggacgggccagactctgaggaagagtcggaggcggagagagagaatcgaacccaatcgaaaaaaaagaagaggagcaggatgaagcgcatcatcatcatcagcctcgaaatccttctccccagacgtctcatctccaccgtctcgctcaacccggccgccggcccagcctcgacagagagagagaaagcggctgcgcgcaagagaagggctcacccgataaaactccaaatgacctgtaagagcaataaactcccatctgcgagtaccgagtaccagatctgggtctcggtttggaagcctcggttggtcgcgcatgcccactgtcagccagccaggtcgaggagacggtgagaggcggtgagagacgggtatcgagtgagatgccccactccccatcccctttccccaagtcaaatgatacggccgtcttactcgagacatcctcggcggtaaaagtagatttcctcttggcctgttgagtgggcaaggtggaagaggacgccgtcgagggtgtgtgcagggaagagacgatctgaggcgccgcgacggacgggtgaagagggaccgcttggagaggttgagtagacgaatgtgaagtgtcgaattctctgtttgagcgaaatggtcatctgggtcagttcagtcgttcttctgatcacacatcaggcagtaaagctatattgtcgacttacctgaggatggtatcgtcggtaaggatcaacaagctcgtcccatgttcgccccacggatgccatttagccttgacgatcctgctctcggccttttgcgaataaatttcgtgagcgattttggtgcccctgtcggatcagacccagcaatcagcttcctcgaaacgctgaagtgccatccttgaccccttatcgaacgtcttctctcaacatcggcatcaatgacgagggtttatcgcaatactcacttgcacctgacgtattttccatcgacgacgttcctcgtctgttcccccagagccaagctgccgatcgcggggagcatgatcacgccgacttgtttgctgcctacgaggaccaagagcttgttcgtcggattaagagagatctggtgaattgtgaaatcgatatcggggttcctaaggacctgcgctcgtgaacatggcacggatagatggagattaggagcatttcaatcagaaggtctgaacagcgaggatatcgacccatacgatgtcgggactcacccagtacctggccggttttccctccttgacctctttgagatcaactaatctgacctctctcccaaccacagcgatcagttctttcccgccccgaacgacgaccctgcttttcttctgaacgacctcttccccgtgcttgtcgtagagcatttcggcctcgtcatcttcgtcgtcaccttcgtctgccgctgcccccttgtcttgaggacccgcatggtccagtgcagaaatcccgaacgtattcctgcgcctggaacctgagctggacggtgctgtggtgacaggcacgggttgcgagccggaacttgagctcgagctggtgggagaggtaaagatgggatgtgtcgacaggctttcgaaccaagcttctggcgagtttgaagagcccatggcgtgcagtacaggccgaccgagactgcaaatggttgcgagttgggatgtagagtctcttttctcaaaggccagtgatattgaatgcctttcggtatgatatgagtagctgagtagtgtgtatgaggaatttgaggatgttggaacatggaacttgtatagaatgatatctcggaattcctcctcctcgaccaagctcgcgtgaatcaacgaggtcgagaagctgagctagactacgactaaagctggtatcatcatcatcccgatctccccacccactacactcggttccgcccccattcgcagcatagcctaaggttttcaagctacctctcacaaggatgtcaacccctgatcaaagtccggacccacccgcctcggagatcgcgagcagactcgctcaaatctctcgtcccgacaatacctcactggacgtcttctggacgtctcacaaccgatggccgctccctcctatccgtagctctggatcagttccgaacggtattatcccggatgcaagatcacatggaatggacaaggagggagaagtgcaggggaagcagacccttgtcgatgctgaacaggaggacatcggaagcgaggtggatgagatccatataggaatctttgattcatccttcaatccacctacccttgcccacttggaaatcgcaagtacttccttcccagcgagttatcgcacggtcgcttcaggagagcctggaaactctgccattgcatcctccagctctgagaaatcggaggctgatagccggataaaggagacctcggccagaagagtacgaagaacagccagacggggagggtatacagccaagcttctcctcctctccgccaggaacgtggacaaacctcctacccaccctggttcggacgaccacgcttcttcctcgattgacagctaccaggatgatcatcagaaggcggccgagcgggaggagcaggagaagaaagtccgagagaacgctacaggggtggagagggtcgagatgatgatcctccaagctcgacggatggtaacattatcgcagggggtacggtctcgagaagaaggagagaacgtgcaacaagagcaggaggcatgcgggaatgaagatgcgaatgggaacattgccgtcgccgtcctcaatttccctacgtttgtcgggaaatcccggatcgtccacaactggctggccgagaaccttcctcgactgctccgtcactcgaaatcagactcgagctcgatcgcaacccgaatgcctcgcgtccgcctgacgtttctcatcgggagcgataccctcacccgtctcttccgaccggcctactaccccgcctcgtcctctttccccgagatcggcccggacatgcacacccagctggaacattttttctccctcacccggggtgacgcctcgaggatcgtctgcgtacgaagatacttgacgtccaaggagagggaagaggaggaagagtttgtgagaggggatgaaggatgtcggaggtgggtacatgagggtgggattcgatttgtcgaggaggagaagggtggctctgcaaggcgggaaaggggcggagtgaaaaaaggggaagagatgggattgatcagtagtaccaacgtacgacaacgggtgaagaaggtgcgccagcagcaggccgatcgacgtgctgaggatgcaagggcaggtgcaggggaaggaggagaaggtgcgatcgaacaggccacggttgaggcgttgcacgatttgtgcatcgacgaggtctcgaggtatatcgcgaggaagggtttgtatcaatcgtcataggctacgtcccgcaataacgtgggagagctttgtgaatcttattcatgccgtctccgcgacttctcccggatcctcgaccattcacgtaatttcgacactgatcgttcaaagcgatcaaagggggatgcaccacgatgacggggtattgcataacgtcgagcagcatcgagattacgagctcgcagtcgatcaagatcctcgcttatcgcttaccggtactttcatactctcaacgtccaattcgggttttgcttgtaaagtggtgtacaagtggcaaataccgatgatccgatctcatgtcgggcatctcagaatctcagatctccgagatcggatcaccctatatggatctccccgtgatgatcggggtcgttttccatattgaatgaacgatgtaaaccttctttcgaggggcgatgacgacagcaacacggaagcgagagaatcaatagaaagaagtcaaagggtagctttgaactcgttgaatcggatcagcgtttcatgtcttaatgatcggcatcacccggcttcgatgacgtgtaaaaacccggtaatcagccttctacgttcctcgctcgtttgatcgcgggattaaatggaatcggaagctaatcaacagttcacctcgagctctccgctgcgctaatttacttccgtaactgaacggacgatctcctcgctgtgccgagctgacaggtcccccccccccctatcgatcgattcagaccgggagagaggtcgaggtcatggtgatgacgagagaactatcacccctcgacgtcgagctctcggggatggaaatatatatatatttatagagtgtagccactaccagtccatctacttacagctctttgacaacattcccgagcaatcaagagctaaccacatagaatcactttcccgctcattattcgttcaacattatggctcaatctcacatcctcgggatcgcgacccagttccccgagttgcagaacacggtcgagggtactgaggcgttcttcaagaaatgggctaaacccagcgaagcgtaggtttcgaccattctgccagctgtgtcggtgtgggcatcctcgagaccagacgcgtactgacccatccgaaccttctccctggcatctcacgtcaccgtcacctcacccgcccgcctactggctcgacctacccacgactcccagtctagagaagacgctcatgatcaaccgatccacccggatccagacccgcccgtctgtttccagcctgacttcgcccctcctcaacggacccaccgcaccgacgattaaagaggtcaacagggtgttcatgaccgagggtgtcaaactggccgtacaggccggagagaaggctttgagggattggggtgggaagagggaggagattacgcatttgggtgagtgtcagagtcgagtcggccgttgagaggatcgtgagggtacagcacaaggagattatggggatggcgggaggtcgagaaaatcagcgaatggacagatcgggcgcgacctggattgcagactcgacttccgagctgcagctcgaatccaggatgagttgcaagacttccactcgccacgattctggaacccaggcttcgcgatcgggattgcgacgattgctttctgtcgtccggatttcagtgactgggttgctgggttcaagactgagatgccgatatccacgagattgacactgatcaacgtcgcttgccttccggtctggccttttcgacgatctcgtgcaccacctattactcaccctcaacaccgccatctcgcaccgatgtgacaacggacacggctcgacagtctgcaacacgtgtaccgccagtgcctatccgtgagtccgtctttacctgacatgctgcacctctatcggttggaggcgagactgacctgttgaggatctttcttcgcgctgatcctagagggtttgatcatgcggtgctcatggcactggggctcgggacagacgtagacagaaccctgttgcacggagtcggctgtgccggtaagttcacatctccttctgatcagggtcgagcgatcgattacctaatcactttgtgttctcgctcgtaggcggtctctcggctctccggttggccaactcgttcgcccagattcctacccgcgacaaacccgctagaatcctcgtcatcgctaccgaggtcacctctacgcttgtgcgtagcgaattggaagagctcgatagggccggtggcaagatgggcagcgtcggagtctgcctattcagtgatggtgcaagcgctatggtcgtgggtggaggagaattgcagcaaggaggttagtcccagcgtcctgttccgggccttccaggcgagcgctcaagtttacacccattgttcgatctgcagaaaaagccagcttcgaggttatcaagacgttgaccgagacgttgccggatactgtgcctgacctcggattcaacgtggacgaaaacggttggaaggtacgtcgtcgccttgaagacgtcatctcgagttcgactttcatagctgatcggcgtcttttgttacctcaggccatcatctcgccgcgagtgccatcgctgacctcgaaagccgtgccggacatgtacaagaagctcctcgccgctgctaccgccgccccggatcagactccctcacttccctttctttcggcggaagaacctgcctcgacgctgccatcgtcgctcgattggctcatccaccccggaggcgcttcgatcctggccaagattgagcattcgctgcaactcaagtcatcggatcacactcgagccagttgggaggtttacaccaggcgagggaacacgagcagtgttagcatcggcgcggtcattgagcggtcgagagctctgggcggaagggaaggatgcgtcggagtcagctttggaccgggtgtgacggtcgagggatgcttactgaggcgaaccgggtggaaaggacgtcaggccgagtcgaacggagggatgaaggttgaggtcgaaaaggagtccgtctctccactctccgctgttggcgccaaaagaaagaggggagcggccggagacaccagcgatgcagaggaggctgagatgactgtcgaagtggctggcaagaagcgttcggtgttgctgacgaacgggcatgctaaggaagctcttaatggcaatggcactaacggagtctcgcatacttcggccgaagccgccaagctcgctcatatcgaaggggccggcaatggcaacatccatgcggacagaaacaagcctggaaaacacgaaggcggggtcattaacggggaagtgaatgggatcatcagtgcaccggaagggttcagccgagacttgaacgtcggggagacgcaggagaagatgactacggtcccatgaaaagcacgtaaaagggatttataatgggaaacgacggtcattttcggacgaaaatcaagcttatattcccgggtcaggactcatatgtcatctgcctaaactatgcgaattgtctattacgagtatcaagatgaaaatgacaagccatacaaatttgaacatcgtttttacctcgtgcatcgcgcaaagcagctggtggaccgatcttcatgcccgagtgagtcacgagcttgcgacagtctgaacaaaggtggacgatcatcacgtatcgtgattgcgacatcggcagacttcttgagagtggatcctagtcgactcttggggcaaaagggctattgcagtacaggcgtgcagtgaaccctgaagctgatgtaaggaatgtcaaagccgtgagtcacttggatcgagtatatatatccaagtcgaaatactcagtaagcagactaaggccgaaaatggggtctgtttggcaaaccgttgcgccgatcccataacgtacagaaaacaactagatagcgcgctatttcggaatgaagctagacaaggagagcaaggaatactatattgaacaggcaggaggtctagtcagtgtccgagctgacgttcccctgacaaaagatggtataaacgatttgagaaaggtgatcgcgaaaaaaataaacggcattgaagctgcccccggcaaagaacagagggctcaaaggcaagcacttagcgcggtcttcgtcgatgcctgcgaattcgtaatgctcaacctcgaagataaaacaagcaattccgaatctggttcctgcggacaaagcggctacaggctactcagtcctgattcgaactcgaccttaggcgagaccagggattccgccgtcaaccggcccatcggttccactaaccctccgacgctgtccaaaggataccaggagggaggagacgattttacaacctccttccaagcctcgaatttgattccggatacaaactagcagtaacgctctttcctgacattcgctatacatattcttcccgaagcgataacacgagtatacaactcctgtgtgcatgtgagagcatattggttacgattttgcgaaactccgaaaatttggtcggctaatatgaagagggtcatctcgaaatgatctaccgtggaccgattccatcgggcgtgtcgctgtggcgaagcaacctgcactcacatatgatttgccgaggtgccttcacctggcttggcacacgtttcgcagaccagagccttgtcggcaaccgcgttcgctaacgatctcattttgccctgctcgctgaatgtcctatctggcgaaatgcccaaaacgacgtcccggtctgtcgagtaggcgttcgttcagatcaagaacacgggatagagtcggatgtgaaaacgaagtgtcacgctgtcggctcgcgtgtgatgccacctcgcgaccgtctttgttttgcgtttcatgtttactcgagtactcaccccttgatctatttggcgcgcgcgactgtttttgtttgcaagaaaagagtggaggtcgaaagggtgaatgacctctattgtccctcaatcgatcaaaaccgtagcaccatcatatcttaattctacatttgttccatcacaaagtcccgcaagtggaccaggttcagtgacataggatactcttcccaacgaatcttagacaataatgcctcgtgaagcggtacttactccgcgtcttcgggctcgtagcgggatcattcacggttggttttccgagtttctgatggagcttgaaatgcacctcatctcgtccctgcctgctgataatgggtaacaggtatacctggactgtcctggctcttctcaaagatcagtcatttccgacccaaacctccgcttgaagacctcctgtctgctccctatgatcagcatcccactcgcccggtcattggccacgatcttcttcatcacatcgtctccatcgaagaccacatcaatcacatcctttcccatctggatgatctggaatccgatgatacatctgcggtaccgaaagaacctgaattggtcaccaggggaatgaccatgatctccaagctgtacttgacggttctgggagcgactttggattaccagtacaacatttggtacccttctcccgagatcagagcatgggagactttgatcacacaacctacgcagccggatattcaccccgagctagtcgttgttgccgtccgcgccctcgagaaagccatctattggagatcgatcgttctccgtcaaacacgggtggacgaaccctcgaaaggactatggtcatggccttcctgtgacatcgctcggagcgtagattggggccttgtggacatgttcctaccgccgagttcttgtagacttgtgtgggagtctggcaacgacagagaagaagcagatctgataccaggactggatgtcttgccgtacctcttggaaaagagtcaagcggctctggtccacctcctcactcgggaccgacaagtacgtcaaagacctgaacacaggaagagaccgatgacgcagcgagatgttcaggatgcggtcgtcgaggaagagcaagaagaagatatcgtcgacctaacaccaggcgaaatccttcaccgagcgaagtatataacagacctcctcggggtcttctatctcctcccgtccaaagaagcccgacttgctctttcggatcccatacactctgaagatgtcgatgtagatgaacggacggtgggactctggatccgtctgaaagcagggacaagacgagcggagatcctgcacgacctgggacggctcgaaaagagtgagctgtatccatcggcggatgcagaggagtgcgacgacgaaggtcacgaagctggcggactacgtgggacgacgcgcgtgggcggttcagtcgaggagacgttggaattgatcctcctccagatcgaacgtatccccggagaagacttggctcctctcctcactcgtacgcaaccctggttacctcgatcaattgagaactcccgatcttacggttcctctgaaagttctgctaaggaggagagtgacgatagtgaaacgaatgccgtcggtgccgatgatgcggaggacgaacctcgcgtggaggacggggtcgcttgtcgtaggatgaatcatccggacccacccaatcgacctctcctcgtacgtcttttcagaatctacaatcggtaccaagaataccggtacgctctccacctctcacaaccgaccaaaatcgtcaagggcgaatcgacaggacccagttcgggcaaaagaaaactcagcaggttcagggaagatggagagctaggagccatctggcggagggtcatgtgggggatcagcgagattatcgggatgtgagtcagacttgtcctcacccttagatcgttccagacgcttacggtgataccttggctgtgattttgcgatcttttgtagggagaggatgctggatctcggtctggacgaagatcaggccgaagaatggcaatccggacaagcggtttctagggcgaagatgagctcgagcttgagtcccgaaggagcgaatcgatcgtcacctaggtcgaccagttgatacattcacattggacattcgagatacattccaatgtccaggacagcctccggatgacgcgagatgctctcaaggtggacgactttgccaatatcgtcatctcacagggatcggacgtactcgaacatactttgtctgaaagatgcggccggctttgatgcttcccatctggtagcctgtccgtcagacaacccttcaaattgatgagcctgtatcacggctccaaacatacatggcggatcaggccgaccaagcacttggcaatggtcattgtctcagctctgacccggtcgaagcgatcggtatggatatcctggatgaaccggatcgagatggacaggtgtcaagtttattggaccatgatcatatgaaacacgataaaaagcttggtattggcacaactggctggttaggccacgggctaggagtaattctcggtcgtggttagaagcaattcatcaatgcggcggcgatactgacaccgcgatattctggatcgaggactaggtatccaagagaaactttcgcagcatccgagaattcaccgcgagctctgttatatcactgggacacaaaatatcatctctcgcgatctcttgaacaccgaggaaagatacaacgtcattgcatccaaaggacttggaactcgacacttggggacgagtcgctgacatcgagcatgttgcaactgctgaccaggttcgacctcggtcaccatctcaacaggcgataatacagccccaacttcagatcagccttcctgtcaacctacgctctccatcgtcctactttcacgggctttacaaactaaaaatggagatctccggttgtccgtgcacgtccgtccatggatctcgaatcacggcatcacccgaagacgttttgacgcgcaacgtgaggcccgggaaatggatcttcacccgaaaagatctcgtgcgtcacccgtgttacgttcgaccatggccatcggggtacttcgacgcctttttggtcatttcggtcagccgagcaaccaagagatccgcccgaagatcagccaaagggatcttcgggagatatttttggggtccgatgcgaagaaaagaaggcgtgtttccgaaaggaaggtgggtctgatgagattttgatcggctgtgtttcaaaaacgcgtgcgcgcgcacggcgagcgatggatctgatcaaagcgacgatcaacgagatttcgcaacaacgtcgatcgctattagctgctggatacaagtgagaaagtacataaggatgcaaggtctacgacgtgacgctttatatctcgaagaacgaccgcaaacgcaagaatcgggaggtttattgcgacaaagttcccatcatcaattcgaatggataacacgacgaccgcgtaagactcgaaaagccccggtcgtccttcccttccatattcacgcgccctggtcgtcggtgagcttttcctcccctcacgcctttttgctcaattttgatgaaacgtctggttgcttactccttgtcaccttgcatctcggacctgaatagtgacgtcgatgcgaccatacagcagctggcctcgtgaccactgcccctcctctccctttcaccaatgcaatccgatttccccattgaggtaagtcttccccaaaagttttcagctcactgacgagccgccttgcctctttgctctcccctccaatgccagcacgtttgtcgcttcctcactgcgatcgcaaaacgtataaagatcgaggcatctggatcgatttcccttttcttcgccactcgcctctctcttcctcttttcgacacaatcccaatccataacctcgagcctcacagcacacaacatcaatactcatacaaaacttatcaagcatgcttccaatcctggccgtcggccttgccttcatgttttctctcctcttccctttcatcgacatttcctctctcatcaacaacaacgccatcatcagcaactcgattccctctccctgttcctctccctctctctctccttctttctctccctgggtctccgccactgaatctgccgccctcaagacccccctcaagaccccgtaccctgtggccaatgtgctgcccgagctcgatttttataggacggtaagcatcaacgcgacctgcctttgaaagatgagactgatcatctattcggtagaaacagtacttgcccctcgtcgttcttgcgcctcctccgatcatcgtcgagtggggtgtttctcagtccccgcgtcaacaccttcatcgaaagccttcgcgattcatgacagtgatgaggaagaccattatcattaccatcacaatgatcgagaaactcgtcaacgcgctcgccgaggcccttctaaggttgagggacgtcccctgggaaccgatcggcgtctcgatccaggaaataagcgaaccggttctccatctactggccaaagtcgatctccgaaacgtcgacctttgggctctcgtcattctcgccctatacgcctacggatctcgtgacaacgtgcctgagagtaagattgaagaatgcccctcggcatcgactatcgagctcgacggtaaagtggaggccaagcctgagggtgagatagcatcctccctcgagcctcaaggggcggctgagagtacggtgggagaatgcccgtcggcatcgaacaccaggctcgaaggtaccgtagagacggcaaagcctgagggtaagatgggggactgcctatcggcatcgctcatcaagctcgacggtccgccgacctcatcgccaccctcctatctgtccggttctgttgggtcgaaaggtcttgctgagaaccatcagcccatcgtcctcgccaaagatgaacctggtcttgctgttgaaaaccgccagcccgccatcatcgttgacaatcgctggcccgtcgttattgctgacaatcgccagcccgcctttatcgctgatgaccgccagcccgtcgtcatcgtaaaagactcgaacgaggaagactcgatcgctcaagctggtcttgccgtcgagctccagcctccatccgttgtcgatcaccagtcttcatacgttgcccctcatgacgtcgaaacggacgaaacagctgccgacaacgacgtcggaatggatgagaccgcgcccgaaaacgacatcgaaatgggtgagaccgatcccgaaaacgacgtcgcgatggatgagaccgctcccgaaaatgacgtcgtgatgaatgagatcgctcccgacaacatcttcttcgacactcaaccggtggaggaaacgatcgtcgccaagggtccgatgcctcacgcttgtcttgtcatcgagcagcaccagcccgcatccgtcgacgattacgacgtcgaaatggacgcgaccgctcccgacaacatcgccgaaagacaagcggttgacgaacgggtcattgccatagatccaatgcctcaatctggtatggtcagctccaccactaatcacgacgtcgagatgaccagcgaccaccattccgccgaggagagcgttcagaactcaggcgaagaggattccgcagatgctcccttcgcgcaagcggatgatatgacggctgagcaagaagcccagatcatccaggccttgttgagtctgggccagacaccggttttcggactcgaagacgtggctatgctgggcaacgaggtcagcgcgccgggcgccggaaccctaaacgatcaaccgatgttgcacggcacgggatcttctggagcgatgggaccatccgtcgtctcggacggcgatgcatcttgcgctccgatcaaattcgcgttctctggaaaccctggccgggacgacagcccggtgtggtccttctcggtcggctcgctcgttgccggcaacggagtccaggaaaaaccgctgggtgatccgagcgccgctgggatgaagcaggcgatttccgagccgttcgtcttcggtgcacccgccatcgaagctccgagcttcgacttcgtcccgtccgacggaccggtataccctgggaaaaccttctccatgttcctcgcgaagctgaatgcagatcagctccgtgaggtggagaatattctgcggcaggagaaggaggccggatggccgaggcattatggcaatgccggccaccaagacccgccaccggatatccccgttccggatgtcatcgaagacgaagacgatggcgacgcggacgatccgctcgctgagcgcttttttcacgactggattcaagaaccgtagggctggaccttgcgtaatacttctctggcaaattatttctcctcgctggcactttcttcctttacgatacgacagagcactttcttgtcttcagcaatttcttgttgtacaatataacgaaccattcatactttgacgtttcgacgggagggcgattgcggatgacaccggactacaatccgtatgcaagaccaagatctgactgttatgaagtacgcatgtccaaagctatagcacacacgaccgatcccaggactgactcgtacggctatactcaggtatggctctcacggatgaagctatgatctattcgaacgtagagtctgtgagctgtatgtaatcatttagtgatcatgacagtaacatatggtggacagtccgccgcgagcagatcgttcacgtcgtccccgttcgttagcctgcatgcagcgtgccccgcgtgatcgagtcggaagatgcccgcacgcagtgagtcgatgctctcaactgaattacaggactcggtctacgtatgcagcattcgcctagactgtacgcaagtcgccaacatagctacatcccgatatacaacaatcctctacaagtcactcgaagggatcttgggggtgtcgcgatctcgcgcgatcctttggacacttgagtcgcgacaagtcgcccagaggccataggtcaaaccgattcttgtcagagactcgcgagactgccccggagagactgctatcacggtgaaaatgaggatatcggtcatagtatacagtgatcaagaaatgccggaatctcagatccatacaagaacgaacgaagaaaaagttgaagcacgcgaacagaaaagactttggaatcaccctcacaggtcatgaacccacacattaaagacgagcgccgccagggcgtcttcctcttcatgtgccgcggtagcttcgggagcggacggcatggtctcgaacaaggcggggtcgaactgataatcctcagtgaactgagaataattgaactcaaatgagtccgccggatgctcttggcccgccaagtccgctgtcaaagatccctgatccgtcgaatccaccgtcgggacccattgttgctgcgcatcggtggtactggtggccgatacggcttcttcgacgactcctggaccaagtgttgcgatcttagcgtcaatcactgccaattggtccggcgtcatcctgtcgagatgcgctaagatttcatcttgcgtcaggaagggttcgaccacggtttcctgagttttttccatggcggacgtcatcacgtccatctcggcgaacttttcggctgggagagccttcaagaacggtttggaagtgtcgtccgccatcgcttcttttagctcttccggcgcctgtcgagccacattggccaggactcggttccggggacgaaaggtctgccgaggatcatcgacgtaagatcattgggggcagatgggatggagacaccatcctcaagcagctgatcattgtcattgcctggggatgtcccccaataaattattgggctatcatggcaaggtgtaggaggagtgggagcaaacttcaattgctcatttctgccgtcaaccatgtcggagtcaggggtcgacccggatcgatgtctgtcgcaggaggcggtgcaggatgacagaatcatggggcgattggctatggtgcctagtctcttagcgtatgcggcgtcacgagttaacggccggatcggcagtcctgtgggcttagttcgtcgtcgtgtctgaaatgtggtcgttcgcgactttgcatcgggccgagcgaggacaacgcgataggggggtgtcggtcgcagtaagtcgactgagccattttgccagtcatgctatgcgaggttcagtagcttgagtggtctacacgtataaagcatatttgggcagtgccagtcagggttcgtacaccatccgccgttcgtcgagtcgcgttgcgtcgcgaccgagaccatacaatcccgtatttcccatcctcatcctcgaccaagctcgatcacgatcactcgtcctcgtcctcgtcttcgtatcgcaagaccctcttctgaatgacggtctgtgtctgttcgggaatatcttcgtcatcctcgtcgacatccatcagtgcggctttgttatcggcatcgtcttcagcacttcccgccttgatgtcgtcttcggccggagaggctgttttcggcgacaccagtttcgtcagcgcgatcgatcggtacggtacgatgatcgggagagcagacttaccggcacgttcctgctgcgcgccttccttttccctccgtctcctctccttcatctccctcttttgagcctgtgcgttctcctcggccgctcgttccatggcatcgagcgcatcctcatcgtcgtccgtctcgtagtctctcgaactcttcttggaacgtttcggtctcgacttgcgttcttcgttttggacacgttccaggtccctgtccagggcggtcagaccgttcgactctgccgcagagacttcggaatcggatcgtccaccccgctcgtcctcgtcgtcgtcgacctattttcgagcgcgtgcgcaacgatggcaaggtgaaggacgtcagcgccatgcaggccatgcgagggggacgtggccggcgatactcacgacaaagtcgtcctcttcgtaatcccctccggtgtatcctccaccacctccacccctgccctcatccgcatccatatcttcgtcactgctataactcgtcctgccctttctcggtcccgaaggacctcttgatttcctgccggaagcgccgagtggactggtctccctctcccgtaacccggccgaggaacccttccacacgggcaagctcaacccggcattcagatcgacgcccctggccttcatccgcttcttttgctgttcattcatctcacgcacgctctcctcgatctttctatccggtcgaacgcccgattgatcgcggtagtgttgaatcctgctcgccttgacggtcgacttgctgaccgcggccaagcgtttctgatgatcccgcacgtttcgcgtttggggtacgagagacatggatccggtgatgagcgagtcggcgatgaggacctggtcgtcaaagtcggtcgagaggaggagggagacgggaccttcccgcgtcccccggggtttcgcgatcgaaccgtccgcggcgagtttcggttgggtcgacgcttgcgaggccatgaactgggattgtgattgcgcttgcgattgcgattgtgattgtgattgtgattgagagccgccttgtccggcactggattccgccttgaccttggccttggcagccacctttgccaacgcgaacggcctggtcgccttggcctcgggtccggaccctgctacgctatccacctgtagatcccacatctcctgcccgaccatcaaactggccgtgccatcgctccatcggatcaccctcgaattgctcctcctcactggcatcccgtgggtatcgtctttccacttccaacggaccgtgttggcgacggaatgcatacgcttgagggcacggatacgtcgagcctcgtccgtggtgtcttcctgatcctcggcttcctgcttggggacttcttcagcgcggtagaggtctgggtggaacggctgtgcggggaatttgatggcgggaggcagtttcaaagcccagacctagggatggtgacggatagacggcgtgaggtgacgcgagatcagcctgagggcgcgttcagttccccatccatggcgaatgaacccacctgaccatcgctgctagccaacttgggcacttttggcaggacaatgttgctctccaagatggtctgttcgacggcgttggtattctcctcctcgtcatactctaacctcgctcgacgatcgtcctcatccccgctgcctgaagaccttgaggatgtcggggagagggaacgtttacgcttgacgggcgagtcggtcgtcgacctcgccggtgatgacgcgcgggacgtcgatcgagctcgcgatggagctcgagattgcgttcgaggttgaaagtcgtcaaactgcgagcaagggcgtggaattcagagggggtaattgctatgagctcgctttgatcggattggacgacatgcagttcgaaagtctcgctcaccatgtctgccaacccatcctggcgtttcgagggtgaagcactaggtgatccgtttcgagctgcgggcgctggagaagaagctcccgaatcggacatttcgagattgcgagttgacttggtactgtctctagcttatgaccatgtgtatctgggtgtctgtcgaatgatggagtgtgtggtattagttgtagttgtacactagctagtcgatatgatgtgatgtgtccccccccccctaccttgtgctgggcttttgcgcttttgattggcgcgtcaactcgaactcgaactcgacctcgacctcatctgacttcataaacaaacatagtcgacttgaatgtcttgtaacttggtactgtatatgctaccaaagaagctacatgactatacatatcagccagatcagacagctagtcatcagctagtgtgtagttctggatcgaacacgatccgtcctgccgtcgcggttactcgaaatggccaacatatttgatgaacccgtcaaccccgagctgttcgccggcaagacgttttacatcgcagcgggcctcttcaaagagtacgaggacaagttgatctcggacatccaggtgaggagagaacgagttttgagaacgtttgccacatgtcatccctctacaagacctgactcgagctcatcgttcgtggcgtgtaggcccatgcaggactcgtgacggaactcatttgggaatccgactttattatccacaaccctccatcggcacatgaagcatggtaccaggattacaccaaaagacgacaaacctgcgaatcgaattccgtatccatccccgcgatccggccttatcactgggtctacacatgtatccactctcgtccttgccggatcatcaaatccggcgacccggaatacacccagctaccccgactcgtgcagcacgagggctatgtcgactataatggcatggtgagagagatcacccgtcctctccgggtctactgtaccatcaacatgcccccactcggcccagaggaagaatcatgctcgaccgctctgaagaccgtgctcgccaagctcgaatcccacggaggtttccgttccctgaaacgaggcgcagcggacatgctcatcctcgataccagcctcgattcgggcaagaagttcaagtccgaggctaaagtcagccagacggtcgtcgagagatcgtggatcgaggaactcacggccaagacgacccagtatgtcagggggagaccgccgaaagggtccgccggggggcagagaaaggtcacggcgacagggaccgagatggcaacgacatcactggcgagtgggagcaagacgaccaaggggattggcccgggggaggggggcgatttgtggttgaagaagccgtcgttgccgttcaaggggtgagtcggatacgtctcgaggccgagggtcgagagggtgggcagacgtgctcatcgtgcgatacgctgcgggggatccgatatcgcaggcctgctggaggtcggacagagtttacggaaaaggacgaggataacatcctgcgatggctggtttaccaccatccgcaaaagaccaattggaaatccatagccatctacaaagaactcgtacgttaccccttccttgtctcccggcatctacataccaaacacgcgggatcagaggttctaatcctagacgagatgtgtctgttctggcaacacgcctttttttcctgcagtgcgacaagaccaacgccaagtacctctactttgccgatcgacataccgcggcatcgtggcacgaacgcgttcggaaacgataccccgcgtttagcagtcggagcgcacagtacactgggacgaatgtcgcactggataggcatttgaggacgagagcggagagggccaagagcgtacaggagtccggggtggacacggtgaggacgtggatccagggggtaggaccgtatggcaaggacgatgcggcgtcggcttcggcgtcggtggcgaacggggtggacaagggaaaggggaaagcgacggcggcggatgtggatcgggaagatgcggatagttttgcagcgaccgaggatggagacgcgaatggaaagcgaaagaggatcgatagcgacaaggtggcgacggcggcggtggtcgagagaaacgtgtcgaaggaaccggtaccgaagaagtgagcacgataacgaggaacacacggcgagtgtagctggaaggctgatcggaagaataacactgtttttctttttccgatagggccaagcattccgacgaggtcgtcccgatcgataccgcacccgaccccaagacgactaccgcaccagatcccgtgtcgaccacccagaccgtcgtcgtcgtgcaggaaacgcagatcgtcaccgagagcacggtcgtggatatcgaattgtccagggcagaaacggcggctcggccggccggtcaagaaggacccccgaacgagatcggcgtcgatggagatgacgtgacggctgccaatgaagaggatcgtgaacgggcgactgaccgatctccactccggaacgatactcaagcaggcactgtcgtcgtacgggacgagtcgctgatggtcgatactgtccgccgcgttgtcgacgccgtggcgaccgcttacgaggaaacgttcgaatcacgtcctacgcagcaggtcgaaccgactcaacaggacgagccggattcttttgccctggcgagcgacgacgagatggaggcgatgatgattgccgagcagaaacgagcccgactccagtccgcccaaacaccgtcgggcgagcccgcggatcagcttcagacgatgggagtcgaggtcaagcagaaggacaagcggttgtcgacgttgagcgagcggcaggtgaacgatctcgtcttggatgggcaagagacgtcgatgagatcagaaggggaggctgtggtcgtccaggggatgcaggtcgacgaggaagccaagacggcagatcaggtggccgatcatgggacagctgcaggcgggaccgttcaacgagactcgaccacggacgctgcccgtttgcctgcagttgaccaggaccaggaccaggcccgggatcgcgaccaaaatgagaacgcgaacgaggatcagaatcaaccccaaaaccaggagctggaccttgaccccagacgacgagctacgagctctaccggcgcctcttcccgtgctcgtcggcccgtccagacgactgaacgcgctgcgcacattgtggccaagacgacccgcaaattcggggtggacgtcaagaccgtgctctctgccatgcaatacgtcgtcaagcacgacccgaatggacagatcccgatccccgagttatggaggttgttggcagaggatcagaaggacgggttcgagaggtttggaggcaaggttcggcgagggtgaggcgaagttttgagggggaggggcgatacacgtgatgggagtgtcatatgacacgaaaagaggctctgattgctggttgtatagatcgtttaagagacttggtttttttctctcctttacgcagcgccggatataggtatccactctatgctatgaatatgctcgcgcaggactaggatctaggctgcccgggaacccccctccccccggctgagccgggtcccgcgtcgaggaaacgggatgtctatcgtatgccgcagatcctgtcgtcattttggatctagagatctctcaattgtggacggtcagctagttcattttaccagcggatcacggatcacggagcacggatcgcggatcacgatgagcggatggtgtgatgtccgttgcatgtgatgtgtgtgtgtgtaagtgtttttcggccgaatgtgagcgtacgtatttgaatcgggttcggtccattgattgagcgaagcgaggtgatgggccatggtatggtatggctggcatggctggtgaatgtggagacccccacgtccgcccccgcccctcccgctcgctcgcttcgttatcgacaactttcgcttggatcgaatcaaaacgtgatctgatctattcatcatcaaaatgaccccggcccgaacgagaccaaccgccagctttccttctctttttgcttccgtcgggtatccattggacggattcgtcaaccctccccccggtaggccagtagccagtagccatggccactcgcaacgtcgttatctccagggtagatcggtagaaattaacgacgtcaaggtcgagtcgatagtcggagagatcacagagatcagagatcatcttgcatcttgtcatcatcgtcgtttactctcagaggtggtgctttgcgtgaccgaccaactcgaatccgtcctgacaggcaggtgagtggacgaccctttacgccgtccaatcctccgggcactccggtccagcgcgaccgagcggaacggaatcaccgggggaggggagggcgggtcacgcacacacatacacatacgataactgacctcttctgtccctttcaacatcagaccaaccaaccaaccaaccgaccaatcaacgtccacaccacacaatacattcatcaaagttcttcatcccgctcacgaacgacacattcggcatcccctgttgacggtcgatttcaccgatacaagatggctcaggctgaaggtaaccccgtaagtctctccgttgtgctcggtaaacaccggcagaagatggcccttttatactgaatctcccccggtatccttccaccaccacctcctcctctgtactgtcaaatacgcacatctcgctctggacgtgctcgtcggatcgtcgacgtctgactgcatacccaacaacacgcccgtctaccccgattcctccttcccccgttcgacaggctcatagcatcgtctctgccatgacctctgcttctgccggtactggcgccggtagccccggtactgctgcgaccgggaccagcaccccggctgcccatacgtgagtcttgctcgctacccagcaccaccgtcatcgtcgtcgtcgtcctcttctcgacacctcgaccaccccacctcgatcgactgaactgacccgaccaccgtgccgcagcatccagaccttgcgaaagaaacaagccggccacgcgggtcccttgaaaaaggtcctcgtcgccaaccgtggagagatcgccatccgggtctttaggaccgcacacgagttggccatgcagaccgtggccatttactcgatcgaggacaagatgggcgcgcacaggcaaaaggccgacgaggcgtaccaggtgggcaaagggttgacgcccgtcgccgcgtacctcgcgcaggatgatatcatcaggatcgccctcgagcacggcgtcgatatgatccaccctgggtgagtcctgcgcaagtcggtcgccggtcgtcggtcgtcggtcgtcggtcgtcgacatcgtgctgatctcttccccgcgcgtccccgttgttcctctgcagttacgggttcttgtccgagaaccacgaattcgcccgcaaggtcgagcaagccgggatcgcctttatcggtcctcgacccgagacgatcgacgctctcggtgacaagaccaaggcccgatccctcgctcaaaagaccggggtgcccgtcgtacccggaaccccgggcccggtggcgtcgtacgacctcgccgaggatttcatcaacgagtacgggttccccgtcatcatcaaggccgccatgggtgggggtggacgtggaatgagggtcgtcagggatcaagcgagtttcaaggaaaactttgagagggccgtcagcgaggccaaggcggcgttcggggatgggaccgtgtttatcgaacgtgagtcctcctgcgcgcgcgatctggatgggtaggggggacgtcggtcgtgagggagatcgtactgaccgtcgatggcatgcgtggtgatgctcggacgtgcgggcatgaataggattcttggaccgtcccaggcacatcgaggttcagctcttggccgatagctacaacaactgcgttcacttgtttgagcgtgattgttccgtccagcgtcgtcatcaaaaggtacgttcagatcttgcgctccttccccttcctcccctccccttcctaccgggtcagagcacgaaacaccggtactgatggaacccggattgccccatgaatcgtccaatgtacaggtcgtcgaggtcgcgcccgcgccccatctcgcggaagagacccgtcaggccatcttgggggacgccatcaagctcgccgaggccgttcaataccgaaacgccggtacggccgagttcttggtcgaccagcagggaaggcattactttatcgagatcaaccctcgtatccaggtcgagcacaccattaccggtgagtcgtgcagggtggatcgatcgatcgatcgtggtcaggcagggcaagccatggctgatcagcgttcccccttcgctctgtcttcccttgctcgccacagaggagatcaccgggatcgacattgtcgccgcccagattcagatcgccgccggtgcttcgctctcttcattgggattgacccaggatgccatcaccaagcgaggtttcgccatccaatgtcgaatcacgaccgaagacgccgccgccaacttccagccggataccggaaagatcgaggtttacaggagtgccggtggaaacggagtcaggttggacgctagttctgggtttgcgggtgctcaaatcactgtcagtatcgcatcttctcggtgatgccgaggtcgagtttgacgggacgacgctgatgacgggacgagctgtttcatcacgatcagcctcactacgactccttgttggtcaagtgtaccgtccggggaaccacctacgaggtcgcccgaaggaagacgctccgtgccctcgtcgagttccgaatccgaggtgtcaaggtgagaacgtcccgaatcgatcgtcggacgcatgcaatcagtgctgaccacgccttgcttgccacgcctctcagaccaacattcccttcttgatccgactgttgacccacccagtgttcgagagcggaaagacttggacgacctttatcgacgacacgcccgaccttttcaagctggtcaccagccagaaccgagcccagaagctcttggcctaccttggagacctcgccgtcaacggatcttccatcaagggtcaaagcggagaacccggtctcaccgaggaaatccccatccccaagcttgccgaccccaaagattcgagcaagatgctcgacacgtctgtcccctgccagaccggttggaggaacatcatcttggaaaagggacccgctgggttcgccaaggctgttcgcgactaccccggttgcctgatcatggacaccacctggcgtgacgcccaccagtctttgctcgccacccgactccgaacggtcgacatggccaacattgccaaagagactagtcacgcgctcgccaacgcctactcgttggaatgctggggaggcgccacctttgacgtgtccatgcgattcttgtacgaggacccttgggagagactcaggacgctccgaaagttggttcccaacattcccttccaggcgctcgttcgaggtgccaacgccgtcggttacacttcgtacccggacaatgccatttacgacttttgcaaaaaggccgtcgagaatggtctggacattttccgtgtcttcgattcgctcaactacatcgagaacatgaagctcggaatcgacgcggccaaaaaggccggaggtgtcgttgaggccgtcgtgtgctacaccggtgacgtcgccgaccccaagaagaccaagtacagcttgcagtactacctcgactttgtcgaccagttggtcgccgagggcattcacgtcttggccatcaaggacatggccggattattgaaaccccaggccgctaccatgtgagttcaaagtccgcacgtcgtagaatcgccggatactaatagatcgcgcattgcaggttggtcggagcgatccgaaaggctcaccccgacttgcccatccacgttcactcgtgagtcccgtcctgacctctacatcgctggcgaagcgtcactaatcccgatccttcgactctcacaggcacgacaccgttagttaattgtttcatatctcgcattcacctgaaccaccgccctaaatctctccccatcactctaggctggtatggcggtcgcttcgatgttggcttgtgccgctgctggcgccgacgtcgtcgactgtgccatcgacagcatgagcggttgcacctcgcaacccgccatgggagccatctgctcggctctcgagcagaccgagctcggaaccggtatccgattcgacgacgtccaggctctgaacttgtactggtcccaggtcagggctctctacaagcctttgtgagtgacacattgcagcccgaacgctctgatatcaagcaagctcacccacttgcaccacgtccgcagcgaggccatgtccatgtcgagcgactcgagtgtctttgagcacgagatgcccggagggtgagtgctttgcaagagaggagatggatgagagagcacgatctaactgttccccgacgcgcagtcaattctcaaacttgttcttccaagtatgtcggggctacgtctccctaagtgccatctcggcatgccaaactgacaaaccgtcctttctccgtccaggctgctcaactcggtctcggatcccattggaaccaggtcaagaagaactacgcccttgccaaccagctttgtggtgacattgtcaaggtcactcccagttccaaggtcgtcggtgacttggctcaattcatgaccagcaacaacctcagcaaagacgacgtctcggagcgggccgacaagctcgacttccccgaatccgtcatcgagttcttccagggttacttgggacagcctcccggcggattccccgagccccttaggtccaagatcatccgtgatcgacccaggatcgacacccgtcctggtctcaacatgaagcccctcgactttaaaaagttgaagagcgaattgagggaaaagtttggaaagaacattaccgacgtcgatgttgccagttactacatgtaccccaaggtgagtgtcgacagcaatctcgaagattgcttgaatcgtgagctgactctgtgcgcaccatcgacgaccaggtctttgaggagtaccagggattcatcgaaaagtacggtgacctcagtgtcgtgcccactcgtcacttcctcggaaagcccgtcatcaacgaggagatgaacatcgagatcgaggccggaaagttgctcatcgtcaagctgctcgccgtcggcaagatcaacgagaacaccggtacccgagagtgcttcttcgaggtcaacgccgagacccgtgtcgtcgtcatcgaggatcgtcaagccgccgtttccaaggtcactagggaaaaggccagcagcgagcccggcagcatcggttcccccatggtgagtctagacgagagtacctacgagcccgttgtcctcttgtacgcccgtctgatccgtctcttttcgctaggccggtgtcgtggtcgaggtcagggtcaaggagggatccgaagtcaaggccggcgatcccatctgcgtcttgtccgccatgaaggtcagttgagcgtctcccaggtctacactgtacaagaggtggtcggctgactgccttgtctgttttcatctaactccacagatggaatcggtcgtctcctcgcccgtctctggtcgcgtcaagcgtatcggagtccatgagggcgactcgatctcccagggtgacctcatcgccgagatcgtccactagattcgttgttagagggtttggtagcttgttgactctttgggaattgtaacaatatatatataaaagaggttgatcgatgtgtggcggaagaaggatattctacttagactcttgtttgcatggtcggtcgaggtccctggtcaaatgacgcgtttgacgcgatttcctcgtcgacgcgttcaatttcgatcgatccagagggaatagctcatcatgaacggacgtcatcagaacaagggtcaaccaccatcagctgtagaatcactttgactggcaccttgttcgtcccgactgtagctacgcatcttcttgctccctgacatattcaattgcaagcttcgtatcgccattcaatcgagagacggcttccggcgcaacggtacaatatggaggataacaaatagtacgctctgattcgggctcatccggagcgataacacccctcgagttctgatctgatatgcttataacatggcagcgaacaagaacgtctccagattatcgccgagaatgagaaactcctcgcatcgctcggcctgaacgggttcgcctcgaacgccccttcctccagggcttcgagctcggccccggcctccaagcgtaaagctccggcgaacagtaagaacgcaccgccggccaagaaaaaggccaaggtcgtggtcgtggctcccgctagaagcagcatgaggctgagagggcagcaagcaaagactgaagaagatgtcgaggcgatcgaggtccgtggttcgaacgcgtggtcgtagttgacgttacccgctctgatggtcagctttcccacaggaattcaacgccaacttggaaaaggagaaccagaggaatcgatacctggcgaaaaagataaggaagccggttatggaactgaaagaaatgatggatgaggatgaagatgtcaaggacgagaagaagatcaaggagctggtgagtagggtttcccacctgaaagagagatctcttgttccggctgaccctgcttcatatggctcaaaggaggacacgctgcacaatctctccctccgttcataccctcgcccgaccgaaatcaaacgagactacgacgacctagatcccgcttctgcagctgctcaggcgggcgacctctccctgagacagctgtatggcaaggtccggttcatcgatcaggtcaaggccacgcctgtgcgggcttacagcatgatcgttcatcctgaaaagaccaagtgcctggcattcatgggagataaacgaggaatgctcggaatgtgagtcgctgcgtatcgatcccgcgttcattcgctaatcagagtcaccacccatgcagttgggatgccgatgctattgtcgaaaacgtcaccgacgaggacggggaggtctatgagggggctcctgagaacaatgtctggagggtacaggctcaccaggccagtgcgatcagttgtttgcgatggaatcccgtagatagccaaaccgtaggtcccatcccggtgtcaacagaggtcagctgctcaattccaacacaccttccatcatagctctacactgcctcgtacgactgttcgttgcgcaagttcgacttggcgactgcaacgtcgaccgaaatctatgcgactcccgacgatgacgcgctgttcaaccaattcgatttgactccagacggcaatcagatctggttgtctgattcggatggtggcatgaatcacttggatatgcgagagggcaagaagatcaggcggcgatacgtgatcgccgagtcgctgtcagccgctggaaagaaggtcggaggtttcagcatcaatcgtaagtctacttcggttaacggtgggctgggtattctgttgaagcatctttattcttagcggtcgaaccgtggcttgtctgtagcgctcacaacgatcgaaacatgcggcaagtctcgccctgatccacggtgataggcggctcgctgatcagactatgccaaacagtatttgggatcttcgacatattgacaagctaaagatgcaaccattcgactttgaggatgggccgaagccggcagagggtatactgcctccgcacgacagcacaaattacccgacgaaaaactgcgaatgggaagcgattagcgattacgagacgaagcatccaaaggcaaagattttgagggcaagagcaccgcatggactcagctgcagtgccgcttattgggacttgagtggcaaaagggtcttgacgaccagctacgacgacaagatcaggggttagttacggaaagaagcgaggctcgatcgccctgctgatcgaaagtttcgacttggccctttagtctgggatgccaacccctcacaattcgtcaataactcgccaacgggcaatctgaaagaagtctggcgggcgaggcatgatactcaggttggacgttgggtcaccgtcttcaaggctcagtggagcccgtatgtcgatatcgcgcctcacgtgatggtaagttgccccggcaagcttcagaaggccatgcgtcccaagctaacagacgctgtgtttcaggtcggcaatatgaaacgccgtgtcactattctcagcggccttacgggtcaagtgatttcggactttagcaattcagtgtacgtcgtatacgcgcaacgcgaagggcgatcatagctaacgtcacgtcggatagcgtgactgctgtacccgctgttcacgcgatgcatcccggcaggccgggcacggtcctcggagcgaatgctggagggaaaatcatgagattcggcatcgttgaaggcgaagaggagtaacagccttgactcttagagcaagcgcagcttgcctgatgcttcccgtgacgtttaccgaggcttcgcggaaacgatatcaagggacacccaagagacccacctccgcagtttcatccggatttttcactctcagccccgcgggttcgccagtttttcggccccacccgtacccaatcacttcggacagagattcgttaagtctcgtagaccaggttggactattctctcgttgtgtttcatctgcctgtccgtccgagccgcgcaggcatttgtcaaggcatgtagatcccaaacaatcttttcaatgatcgaaccgtctgtttctcggatccaatcgtgttggtggtctttactacctaggcggcactttccctgactagatcctgcttttcgtcctgaggccgattgacagcaacactccaaacacgaggaatatatcgaaaagccggctctcacaatggccgttcgggccaacgcaaagccaagctgtatgacgatgtatgtgacaagttcaggggagcagattagcttgacgttaacccagatatctcaggtataaaagattgcggcaggaatcgctgtggctttgatgatggttcgtttgtacctggccacaagcgtcagtctcctttaaatcgcatggaaacctggcacagcgatgcttttgcggtcctgtggaaatactcgcttttgattgcacaaattagaagctctttataccctcacgagcgcggccatgtgcatgtggatgttcgcggggaatgggatcgcggggacaatacagtagggcatagcgatgtaagagcgaggcgagtgatgagttgcagtcttcgagtggtcctgttcttccctgtacacccccactcatcacgtttcatcgattcaagtcccccctctaacgacaatcctgatcatgtgcgaggccttcgtctcatcggacccctctggttcatattgatatacttacatgcttaattgctcatccgctggttcctgatgttacgatctgccgaaagcgatcaagaggaccattctgggtgacgttaatccacgagccagagccgtgtggaggtgtctgcgtgaagattctaaacatcatatatggttccggaaatcaggatccgggtattaaattccgataaatttggttccggttacaataattcgatcgatcacacaagccgggaacttcgagagatggctaggtgtgacatgcattgacggtcgtagcttgttactagcttgtccgcgatagcgagcagcccttttcaactcaatgtcaccggttacttagagattgctctgaaatctgcttactcctgctctaccaagccgcagtccactgcatctagaatcagcttgaagcgttcgacatcatggtcaatcaaagcaatgacgatttggtcggatacatcaagtgagacaacccgttccccatagctacattcaagctgactggatggtctgtaatctcatttttcgtcgcccttattctttccggaaccaaccgcaggatctgtccattagccaatctggctactcacacccggttcgccctgacccttcgtacccgttcgcaatcgaccaataccacctccaatccgaacgaataccatcgtctgctcctgttccggttgagtcctcttgttcgggacgataacggacaggctccagagctatactgcatggaatcaacctgcccgcacatgggtgctcccctctctcatgcgcctttgacggtcgacccgcctgccggaccttcatcgtcattagcatcatccagcacaagcccacactcgtgcacaagtgtacaaaactccgacacgaatgagcaaggattaatcgacgagacactgaatttggcactcgctcccgagatggcggccgatatcgaagacctggtagaaggccgaactattacctgcccttggcaccattacgactttgaccttgtcaccggagagagccccgttggaatcagagcatgcgtatacgacgtcaaggtcaggacaggagatgtgtggatcgaggctccggaaaaggggcacgagacgggtagctgggaagtcgtcgaggtcaaaggggtcagcgaagagtttgcggatccgcccgtcaggaagacggcgacccaggtctcgccagcagcggtagcacacgccgcttcggatctacaaacaacctcttcgggcactctcccgaccctgccacgcacactcatccaagccgccattctcatactcaatacgcccaatccgacacacaagatcgagctcacacgccagacgaatcgggctttgcggcaaggcgactttcagagcatccgacctacgaagaaggacctgaatctcgttcgagagacatttgagaagagcacgcacgaggcagaaggtcgtcgtggattcacaccaccgcgagagggtttgaaagaggtcgagccgtgggtcggcggtaagcgaggcaagggcgggaacgagaagagtagggttttgatgattcgtgcgtgcattatccttcgagccactcgcacattattcctgacaacgaattgcgcatctaaatgcagatgcccttgcaaatatcgagcaatgggccatcgaccttgcgtgagtcacagtgtgcttgtgtacacgccaacgatctgaccgattcgctcgcttgcgtagctgggatatcattgctcgatatgcacaattcgaggttgacggagagaagttgcccgtcgagttcttcctggactgggccaaggcaagtctcgtccatcgttatcgaacttgtcgcgggcgctgaccgtcgagccgcatctcgatgatgctgtaggtggccgaagatgaggcaaaacacttttcgctgctcaaaacccgtctggaggagcttggatcatattacggcgcacatactgttcatgcgggattgtgggagagcgcgctggacacacaggatgacttgctggcgaggcttgctatcatccacctggttcacgaggccagaggtttggacgtgagtgctagacgatcgtgtaccgtcagatatcgtcacactgacgtgtatcttcggtgtgtaggtcaatccgatcacgatcaaaaagtttgaaaaggcaggcgacattgctagcagcaaaatgatggaggtcattcacttcgacgagatcacccacgtcaccactggccatcggtggtttacctacatttgtggcaagctcgaaatcgacccggtcgtccgattccgccaactcgttagggaaaactttgccgggaagatcaagggacctttcagcgtggaggaccggggcaaggcgggcatgtcgggcgaatggtacgagagcttggaggggcacggaaacaggttcgaagggcaggccgtagcgggcgagggggatgaaagggtccacccgaggttgacttaggcaagcatgttctcactacgaccgcgttcagctatataattcgcgctggaagatggacatgcattgcgtaacttaaagtcaatgcctgttgttcctagtgactatagtgtagagcatcatttcagcttgaagcggagacatagacgcctctcatttgaagttttggcctgtcttccttcgcgaaatcttggctgctcggctcgatgcgctgagcccatggcgatgatccgagcggcctcggaaaggataagccggtcgctgttatacgactagatcgatgcaaagttctcttgctgtccgttgattgaactaaaagtgagactaggttcgtctgagagcgcgtctcgttatttgtcttcccatcgcatcaatcaggtagtgcaaactctaacctttcgcgcaacataaggtggcctcgggacaaccgacatggcgtctaaaatactgaaccaagcgacctgaacaatccagaggcaatggctcgagagaaagccagggccgatctcaaatgagttgcacagatactgaaatgcgtgatcagaccaccaatttgaagactgaacgcgaagtcacccgaagaccgtaagagggactagattgatgcttgtaacaaaccaaaggtgtctcgctcagagagaatcggtatgtgcaagccaaggtggcgatatctgctcgatggccttatcacctgagcagatctgaacgtcaaacaaaatccccccacctgaagtcacacagtttacacgcacgcgatgcatattttatccgagcatcctgctgatcatattcgaccttctcgattgatacgtcttggcgcgatcggcagcggaagcggattgcccgatggcgtcgcgcaaacccggtcatcctttaacgacggcccgctgatgtgtttcatgtattcatcgcggatcgagagcagttaccttttgaatcgacatagaggacacgagtacatcgaaagccttctcgaatgttgaatgatgcaccttaccatccaaatggcccgttcaaaaacgcgcaacgaccaccttcccgctgatggctctatgtgtggttcacttcgtacggggatcaccagtcgctcggtcaggtcccgcaagtggcacggttgccgcattgccatcccatcaccatatgtgtaccccagcatagttcctgttggttttctgtgcgcagtactcaacaagcgagtgcccttgagatctttccccggctcgctattcccggacgctccgcctatcaagccagactttgaatgttttcttgttgaccttagccctaacaaggactcactgaacggtcagtagcgagtgcgggactgctgcctcgagttctggcctggcctgaatgacgtctctgcggagatgacatccgcagcggaagctcgccaacggtcatcactcgattgccgacggtcttgacaatcctctagtggacaagcttgcggaagggatcttccccaagcacgtcctggtacaatggacaacggtccggtagggaccgatcatacctgaaggtgatctcgccctcaatgaagtctcccacgaacgtctggtcatgagctgtgaagaggagttcatcaccagagtgtacccaatccgataaggagggtggtaagccctgttgagacgctatagatcaagaaagcgcaagcgacgatggtccgtctcgaaaggaagaggatggtagcaactcggacggcgaggaacgggggaccgggggggcggggtggcgagaacgacttggggttggacgtgcgaaaggtgaagacccggtgatctggtgatcggcaagagacactacagaatttcaaacaataatcaacagtgatgatgatgagaacagtcgattgcgattgcgctgtacgtgcacgtccgcgagtcacgcacacaacaagcacacgcacacacaagcacacacacaacaagcacacgcacacacaagcacacacacacacacacacacacacacacacacccacacacacacacacacacacacacacacacacacacaaacacacacacacaaacaaccactccaacgagggatgacagcgggggtgttgagcagggtgacttcgatcaccgatacgacgagggatgaatccgtcgggagcgcgagtgcgagcggggcgggtgggagcgcgatcagcgagtacgtcgtcactccggagactgctcacgtcgagcctgtccccgacgacgttcagaccgaccccatgatcggtggcgatgaatcaaacgtcaccgcagccgcaatgagtatcaatatcccttccccgcccatcgtcgaggtcgccgaacatatgcaaatgttgtccacctcggcgcccgtgatcccccagctcgatcaaatcatgatgggtcaccatcatcatcacgaggaccattcggccgaatccgattcggcgcctccgcctcaccaattccccacctcggtgcctacctcgcctcaacccccaggtccacccatcttggctcctgtcattggcgacatttcgatcggcccgcagttgatctcggggttcaatttcaccaacatcccaccaccacccgaatcgtccggctcgaacgtcgatccgaacgcttcgtccacgtcggccagatctcgccagagttccccacacggacccgtagtagggtggcgggacaatgagcgtcgcgcgcctataagcaactggagggccgctccctcgttgatccgcaagacctcgttgacccgtgcggcctcgctgagtctgagccgggggatgagcctcgcccgcagcaagatgcgggacaggttcggcagtcaggccagcaaggcgcccgatgccgagacggagatcatcgtcgagaatcaggatttcagagtgatgaggcccgcgatagactcccctgatctcgattatggcgaaccgcagaacaagtttgagagcctggacatggttttgaggaacggaggcacgttgtcccgaaccaattcgatctcccagtccaacaacgctcgaccttcgatccgatcccagtcgcaccagaccggcgtcgttcgcgccaagacgaggttggagggggaaaaggaactgcggcgtgattgggaaaaggaacgtgatctctccagggctcgagctcgagcaaggtctccttcggtcttgggcggcaggcgggcgagatcgccttcgatttcgaggagcaagaccaggagaaaggccggggacgtgggagccgatggagccgagagtctcatgcagatcttgaatcgagaggctagacgtcaagagtcggtggaaggacttcctggggtcaagtcgagcgatacggtgatggtcgaagaggtcaatgacgggacggccagggttggacctgctgctccgatgcatcaggacgagtcactcatggacggactgcccgtgctgggtgcaccgatcgacctgggcccacatgtcttgcaaggcgagtcatcggcggtaccttgggctggagaacccatgtctggagtcgagcctccgttgggatctccaccagcagaagaagaagcgttcgagaccgcctataatatccccgaaaagacacccgccgacccggattacgagttcgagttcgagctgccgacccggttgcctccgattccgcagatccagtcgctctcgtttgccaactttcgcacgacagggacaaggcgtacacaggaagaggccgtccgaggaaaattcgtgaccccgcagcggctgtaccacgtgctccggaacgcgcctcggttgaaacgattggccatgaccgaatacgtcgatagcgcgctcgccgtcgaggtgattgaagagatctttcttcgaggatacgatttcgttcgccagggcgaatccgagtcggaacgtcaacgactgaacgggttcgaaccgatggaggcgctcgatctgaccggatgcgtgtcttcagtgtttggcaaggcgatggaagagttcatcgagcgttggttggtcgatcccaaggaacgaaggcggcggcgacggcagcgcgagatggaccagccggtcgatgacccggacgccaggggcgaacgaggacgtagccgagcggtgcatggtttcggcggtttgtcggcggaagatcatctccgcctggccgaggaagaagacgagttttatgaggaagaagacaagctctgggtcaaacccgtattcaagcatcttaaacggttgagcttgagaggttgcgtgatcctatcctgggacgtcatcgctacgctcgtcgggtgttgtcccgggctgacccatctcgacctctcgttcacccgtgtctcaccggcaaccctcgaagcgctgggtcagatgcccgatacccggctcgtcgcgctcagcttggctcgttcgactcgattgacgagcgagagcgtgaggaactttttgtgcgatgctcctgcggcgaggacgatagtcgacctgaacttgtttggggacatgacctacctctcacccctcaacgcgaccgacctcgagtggatcctgaagttggcgccttgtttcagaaatcaaaacttgcgttacctggacctctcctcgtcaccgttgaccggggcgatgctctcggacgaggaagtcaccgtccagcctgggctacgttcgctagggttgagctatatcccacatcttccgctggacgacgtgaccagctttatcttgaaaaaggccagcaatgtcgagatcctcacgttgacacattcgtccacccaggcagacctcccgctcagcttggcggcattgcacacgatgatgacgcttcatgggaaactcatcaacccgctcacatcaccgcccttcaagatcatgtctggcccgagccgtcgaggtcctcatcaggattcccctaccagagtccgcgtgatcgagctcagcgagacggtccgccgcgcgctcggtcgaagcggtggtagtctcgattggcgagtgatcaaatccaagggcggtcgaggatggttcgtcgacgtctctgccggttgggtgcgagagtacgacctgggcctcatgcgacgggtctatcgattccaacgcggtctggacaaggatcacgtgtggaggcgatacttgcaagcgctggcggatgcggatgggaaagtcgggagctcggtcgggtggcatagtcacaagtgcaacgtcatggtcgggctcgggatgatcgccagggaagagggactgtatggtttctcggcattcgcttcggatcgttagtctgggaacggggagtgggttcctgtatgtatcgtcgagtgaacgccgttgacaatgtgtgtagagtataatcgctttggggccatgtatgtacaacgcgaccagacactgcatgtttctagatgatgggtataataatattgaaatcatttaacgggtctttccgttcccgctctgatcaccggtcaagaccatcgtgcagatcgctctggtggccgtatctaggaacgcagaagaattacgccttctcatgcatgccctgaggaggtccagcagtacgaggacagctttttgaacgaccgcttgatgttatgctctcgtctggttcatcctacaccgttcattcgacgttcagtgatatccgctatccatcctgcaaacctatacctctacacgccggcaacctgtcgaggcccatatggtgtggtgttcacccttgaaggcgacggcgaacgcgcgtgtctctccctgaaagatccgagatggtcgcgcccgctcacgttttggccgagtgatcacatctcgacgtcgaaaatcggatggtcatctttcgatatccgtctcgtttcgtccattgcgagtcggagttactacaagcctagggtttgacgagtggaacttgctgcctctgtgcttcagccttgaactcgatcgagtgatgtgtgacaagtgagatctattagatgatcgaacgcagcagcatgctctctcgctaaagcgtactacgtcatccaaatctaaattcaaagtctcggccgcctcgttctcacatggacatcgagaagacacacatcatcgatagagctcatctaccactgctatgacctactcgtgtcccacgatcatcctccccccctccccatcttgcgatcataatcacaacctagtctcaatcaggtctttgccatccgtatcaatcccggccccgaatcgaacctcttttccccaagatgttcggctctcgcggctcgatggccatgacggcaggtctcttacaccagacccctcatcgactcgtcgcacccaaccaccttgccgcactgcgtcaacctctggtctcgtccttgccatcgaaatcatctgtctctcctctcctggccctccgatcgagattcagcacgtccgcacctcgacctcttcccttgtgcaacaacccgtccgtctcttcccgatcctctcgagccttgcgtcagcaattcttcacctcgcaacaacaacgtttcaacccgcaactcctccgaggaacccgagccttctcccttccgaccttcccgacgatcatccccgaaaagtacaaatggcttggcttctttgtccgattcgtagtctcgacctttttcggcgtcttggccatcggagggatcatcctgttgcacgactcgttgacgtacagcgaacgacacgtcgaccgggtccctgcgcacgggttggcactcaatcctcgagtgggaggaccgaagaacttgccgatcatcgagagggacctcgctgatcaggaagacgagttcaccgctgcattggtggacaagcctcatctcgtcattgtcggtggaggttggggcgtgagtcgatccggtccatgtttcgacgggtttcgtattttcagcaaagggggacgatcaagctgatcattttccatccggggtcctcttcccacaggctgtcggggtgctcaaggacctgcccgttgggcaattcaacgtcaccctcatctcgcctgacaatttcaacctcttcactcctctcctgccttcgtaagccctcttttgacctcgagccatctgccccagagttacggaactgatctcatccgcttcctcccccctccctccaccatatcacctgtccgtgacttgccactcacagcgcgtgcgtaggaaccgtcgaaccccgtaccctcgtcgagcctctccgcaagatcatcgcccgcgtccgtggacattacatgaccggctgggccgtggacgtggacatgtcggaacgattgctcgaggtcgaggtcttcaaggacaatgagggaaacaagcagagatgttacgtgccttgtgagtcgtcgtcgtcggtctgggtaccgaggcgtgtattgggcacggtgggctgatactactagatgcgttggcactcggctgcagatgacaagttgatcatcgccgtcggatcgtctaccaacacccacggagttcccggtctcgaacactgtttccagctcaaggtacggcttgatcggtttcgaggcccacacttgctctcaggttcgattcagctcaattcgtctctccgtttctatagaccatccctgatgcccaagctatccgtcgtcgaatcatgagtgagttcacacccggcctcctctagccggacagcaacactggaatcctgctcactgactgcgtcgtagccaacctcgaactcgcttcactgcccacgacctcccccggagagaggaagaaactcttgtcattcgtcgtttgcggaggaggtcctaccggagtggaattcgccgccgaattggccgacatgatgtccgaggacgtcttgtcttacgtgagtcccatctcgaccaatcaggtcagaaaccacctagacgggacgaaaggattgacggtcggttttttggttgttgctgcacgacagtttcctaagttgttgaggagcgagatgagcgtcaaggttatccagagcagggatcacattctgaacacgtactctgagaagatttcagagtttgccgaggtatgtgggaactgaccactgactatgagacagaggagcgggaactgacgaactgtcgctcatctgatttcagaaacgatttgagaggcaggatatcgaggtcgtcaagaacgctcggtaagccgacaaacaccttacaggcaggtcttgcgcttgagactgatgagaagttgatccgacgtctgcagtgtcaaggaagtcttccccgatcgagtcattgttaccctcaaggatcccaaggacaaggactccaagccggtagagagggagattcccgctggtttcgtcttgtggagtaccggtatcggtgagcagaaactacccctgaccatcacgcatgaatgcctcacgctgacgcaagagacacacattacatagccatgaaccccttcgtgaggaccttggtcaacaagctacctaatcagtctcacaaaaaggctatcgtcgtcgacgagcatttgcgtgtcaagggatctcctttggggaccgtctactgtgttggtgatgctgcaaccgtgagtctatggaaggatagcgttcaatcgagacggcattaagtaggttgctctttcagatcgaaaccaacctcgtcgatcatctagtcgagctattcgacggctttgattccgacaaggacaataagctgtaagatcaggccgcctttcgacggattgcgagacactaacgcgtcgtcgtatcctctgcaggagttaccaggaatgggaaaagatggccaagacgatcaagaagaactatcctctggccggtgcccagttcaccaaagtgtgagtcggatcatccgtctcgtatgcgagaaccaggagctgaagcgttaatcttcgacgccatgtagcaaggagatcttcgatgcttacgatacggacaaggacaatgtcatcacgctgaacgaatgtgccaaggccttttacgagattggccgcaaagtcacctctctgccggccgtgagtactagactcggatttgccggtacgaaccgaactaacgggtgtcggctctcacagaccgcccaggttgccgctcagcaaggagaatatctcggcaaaaaattcaagtcactttcccgccacatcaaggccttggaagtcaacgagatgcccgaccagccggacgaggcttacgccaagcccttctcgtacaatcacttgggatccctggcttatgtcggtaactcgtaagtgtgactgggtgctgaagatggtgcaggcgacccagacttggaccattcgtccctcagtgctgtcttcgactttggcggatactcgttcgctggtggcctggtcgccatgtacgcctggagatcgtaagttgatcggctcgcaggtgctcttccctctctctgttcgatgcttagaccaacaaacaacacaatgcagcgtctactggtccgaacaatcgtcggtccgtaccaaggtcttactcatgatcgattggatcaagcgaggaatatttggaagggatctttccaaggtgagttggcggaaagacccgctccgcggtatcgatatcgctgacttccagcaaaaaccttccagttctgaccgctttatattacgtacaaaactgtattcgaccaagtccttcaaggacgcaatgtagagaaacatacatagacagaatctcccatgtgaagcgatatggctcactcatgacgcacatggcccaagtgtgacacgagcgtctttccgccctggattccggctcattctgatcttgtaccatctgcataatcacgtggaggacctgacaccatccgcacagcagggatccgttgcagatgttagctctgactttcttgcgcaaacagcagaatgagtcaccagcggaagtgagcccctctataatggtattcatagcaatgtacccgaccgttcgagctacatgcgtttcatggcgaccgcctgtggtcttttcgtcaaaagacagtagtatataaagtatcgtgaatagtatgtgaaatggacccggtagtgaaggacgacatcccctgttggacgcctcctgattctatagacgagtgattatggtgatgggtcgcatggtggcggtcttttttcgaagcttaaaggcatacgtgtgacggcgagcggattgcttaagcccacctgagaagagacaagcacgtggtcagccgttgaatgagaatttcccgtcaaccaggctcttgacctactttccgagcacactcatggcgacgagaccggcgaccagcgagacgagagcgacaatgactcggctccaaggagcagtcctcagagcgcctcgacaccaatcgttcgatagcagatcaaaggcggcgtagagctgaaggcgaaagaatctgcttaggactgttaatcgtacggatcttactgaatggaggcttaccagaataccggccgagatactgttgaggataccgacggaaagcaacgcagcctttccgttggctgcgaaaccgtcgtgaacacccacaccgatggcaataccgatgggggtaatgatctacgagtggcaaacgaggagctcagaacagtatcacgcgggatgagcgaagcacataaagcatacgatgaaagcagcccccatgagccaaggcttccaagcctgggtgaagggcagcagcgcaatccgagcaccgagactgtcatggaagaaaacaacgttagggcattcctcatgccgacaacgcgcttagtgctcacgcaagaccttcgaagaattggtggaagacgatgacgatcaagagggtggtccagccattaccacccgaggctccaagggtgacgccgatcatgatcgagtggaacaagatacccgcctccaaaaccaagacttgccacttctggtccgaagcggccaaatgggcgtggtggtcgtgtccgagctcgaggaactgagggtcgacaccagaggtctcattgggagatcgaggcgctttctcgtgctcatccctggagctgctaggactgacggctccgtccgggtggtgcttggccatgtgtcggtgaccgagaaagtcgagcaggaaggtgaagaaagcggcagcaagagcgatagcaggcgcagtggcctcgtatgacatgtgaccgatacagctgttggcgaacatgatgaaaccgtggaagagcaagtgctggggaagcgaggtccgcgggtcagagtcgtccactatcgactccgaatggtgacaggaacttacgatgaacgccgtggaaaggatgataccggtaccaaagtgtttagcaacaaagaaaacgttgcccatgatacctcgtccccttccggtctgggcgtcgacgttctcctggtgactgacaggacccttccttcgcccgctgaccaagggaatgactactccgagggccgaagtgacgaggacgatgaagatggcgccaatgtgcaacggtttgttgtagttggcaatctcggtcgtgtcacaattcgcaagctgctcggcagtgcagtctccgtggtgatggccgactggtggaaccgaaggttcatgagccttccaacacctggggtgggcatccagcagtaggcggactcaccatgaatgatacagttgcttccatctgattcggaagacgactcttcactgcttccagcggcagcgcagtcgtagtgatcaatatctgcgaagcaagcgaacatacgatcaaccaccgttatatcatccaaatcgggcagctctcgactcacgccaggtacactcggctccggaaggcgaggtgatttcagcagcgtcggatgaagcggcccccgaagcagcggtaggggtagcaccccaaccagcgaccgaggtagcaccccaagcggcgggctctgtaacatcagcgccccagttgttttgggctcgagctccgagggcaagagccaggacggtggaaacgatggtgggtgaagaacgcatgccggatgatcgaaagaggaaagggatgtcacagccgtgaagttccggagatgaggcaaatatcgggaggccataattctgagcgtatgaggggactgaatgtctttattcagaatcgccacgaccagtggagtcggccctgacctcaactccaacgccgtgactgttctgccaagctcgacttttttgaaacgaaaaatggtagaccgaccgtgaagagacgcctccatgtgatcggattgtcccagaaatgactgtggggaaagaacgcattcaggtggtggtagaagggatcgaaaatctacgccgctctgtgggaggtcgcgacgggacgaacgaacgaacgaacgaaaatcgaatgccaagagtgaaaccggttgactggtcaaccgagggtgatttcgaggcgcacttgtgcctcgactagccgaggtctttcaccaaactaggaacccgccggaggattcctcacgtttcgagtactcgaccggtactgttcgcatgatcccacgacgtttttacggcgggttccggttgaaaatcgatggcgatcaactcgaatgaggactggaacggtcactgatgaccgcgtttcatcgatttacatccgtaatatgctcccggatcggcgttcgactgcgctagacggagaagaacaagtcttggcaacgcccaagtggctggctcgactcgaacatgtaggatatcgaccgagcttccctgtggaataacggtttttaccatcatatccctccatactgcaacccttcgcttctatcggaacggtgcgggagcttgttcgacgatcaatggtcggggagatcgaagttcttttttggcttggcagaacagtcaggaagcctggaatgaccgcgagacatccgaacttttttcccagggcgagggtcgtggtggagcagccaggtcttgccaaagttacggcgaaggtggcaaggttataccatccaggatataagcgttggcggtcttggttgtagtgaccgggcaagacgatacctttgctcttgccataccgaacatctctcgcattcccgaccttcctaccttcctacacaaaatcaaccaaaaccaaccaccgctataatgattgccgccgctctcctctctctcaccgctcttctccctgccaccttggccacccccatcaagcctgtcctctccaacttgggcaagcgtgaacttaaggcttacgccgaggaggtcaccatccactcgagctgcaacgtcacccagagcaggcagttgaagaaggccctcgccgacactttcgagatctccgcctttgctcaggaatgtgagtccattccggctttccccgcgtgcagcgccaaccgctgactgttgcctgttcgactttgacagacgtctacaggaacggaccttccgaccctgtctaccaattgtactttggtaccggtgactctgtcgtcgtcctcggagcttacgagaacctgatgaggtcgaacaaggagggagtcctcctcaggtgtgacgacattgacggcagtgagttcaatctctacttcgatggcgccctgcagagtcatggctgacagtcctcttttcggctactccagactgcgtccaggacggctggaggggtcactggcgtggagagaacgcgaccgaggagaccgtaatctgcgatctctcctacgtcgaccgaaagtacaacgagcagttctgcgctttcggatacaacgtcgtcaactcttcccccagctactacttttccaccgacctcatgcatcgtctcttccacttgcccagcgtcggtcttggaaaggtcgagcactacgccgatgaccactccgactgtgtcaacctcgccaagtctgaccctagcaaggctgtctacaacacccactctttgcaatactttgccaaccacgtctacgctgtcgaggtcgcccagggtggtgacgcctgtatcggagagtacgactcgagcggcatcgtcgcccccactacgacttccgccactgctgccgctgctgcctcgggcacttcttctgccgccgcatcttgccgtgagtccatcgcgcagatcgggatatcatatcgctagcctttgctgatcgcaagaatgtcgtttcgttttcacagacacccactctgacggcgaggtccactgtgtctaagcataccgttttgcgatggctaggcagcagcaccgactgaagcctttttacgagggaacccagggacaacatagattttacaggaacgacggaacaaacgaaaacgcgagggagtcatgaagttgaaagcctacctctgcggtcgagcctctcagccttgcgatactcgcacttacgcacacagtgatgctcggactgatcggttcgtggtcttcatcagggagacacgatcggaaaaatgttcgcagaagccacgctttttcaggtatatatgcgctattgtcattagatagacgatctcataatcacgctccttacacatttatggcttgaaaggacgatgtccttgggtcgtcttccaccactggaaagtctgtttgccatacgccagcatcggtcgtgccattccaaacagcatcactcccggaagtcgcgcagtcctcaagctgaagattcgaagtaacgcggtcatctgcgcatctcgattagatccactcggaagtgcgcttctggttttctaggcgattgacgcgcttagtgcgagtacagaacatggtgggtgggcgagactggcctggcctatatagaccatcagctacaccaagcgggcaaacccttccctcctctgaacgattcgcacctttctgatcgacaactcgcaaatatgtaattgctggagatctgattgattcgaccggcaacacgccagccttcatccgttcgagatgtaggctggaattgattcccactcgtgagtgtctctttcttctcggattgttatgatcccctctccccttccatcagtctctaccctcttctctgctattttttgaatgatgcgtacatgctgtgcaccagtctcgacaaagtctgaagacaccataaagcttcgtctccaggttatctttatacgcttccttgtgagaacgacctctgaccaaaaaatacgactcgccgactcttccccgtctgccccttcgaatcacccgctgaagtagagacagctcgctgaccgtcgtctcccctctctttcgataaggtcaagacctcaagcaccgtcgcggagctgcttcgacgtgtctatcgtaagttcttcagttctgcagctatactcaaaaagagacccgcatcggatagcagctttgaatctagatctcacgtgaaagctttgtcataaacttcgaatatttgtatccgccgattcgtatgatcatgtacatcgtcgtgactatgaccgagttgttcgtacctactgtcagaagagtgtgaagttcaaccctggcaagatcgtccagaccttcaactcccaaacccttggtgaattacaaagatccatagaacgactctgaccatgtccgacccagtgatcaccgcagtccccgcgaccaatattaagcggaagactagggaagaggaagacagcgacgatgagggcagcgatgttgtgagcgggactcgtccagcatggaccgccatgtgcaccgagcaagaccattctgacaaagattgaactcgatgtgatagagcatgatcaatgtcgatttcgatttctacaaccccaacccagaggtcgacgagtgagcccgagacatgatgacctctggattctctttcagcggctgatcgaaaacgctctaccgggtcatttcgtcatcagcatcgctctcaaacgactccttcgacaactcttcacttcggattcggagttgttcgatatccacgcgcttgcacagcatattctgacgtcggcagggcagatgggaattgggacgacggtcaaggtggatggaaccgagagtgatccttatgcgtacatcagtctggtggatttgagcaacgtcgacgtgagcccctcttctaaatcctgccccgcattgctcgattacgagctcctgctgatctctttctcttcaccctacctgcaggcaaaacctgccgtcaagcctttggtggaatacctcatctcccgcctacccacctcttctcccttccgcgatctactcgtctctacctcgtccccacagtcgaagaaccggatagcgctcgtagtttctgaacgtctcgtcaacctgcccattcagatcatgcctccattgtggaggatgacgatcgacgaggtggaaaaggctcggtcagaagtgagtcgagttcgagtggtccccgcaaagctcctcgagagcagcaatgctgacagtccgtcgcctgtgttaccttccagggaacccccggaatggactttactcactacttattgatttcgcgagtatacaagatggacgtcggtgacgaaaacattgacactgccatgtcggctaatgtagcgtgagtcgacctttttcatccggtaggcgagtcccggaacataattgacaacgaacaaacagacaaccttcatcgaaaaaggcaaagacggcgaaaccagaggtacttgcgggagcagtcaatctcttccactatcacccggaagaggagttcctcgagcaggtgagactccactgacgttagatggatccgtttcccgaggactgacccagaatcttcatacctagtccgcgttgcacacacatacctttgatttcaagacgtctcaacccaggaatgaagaatctttcggggttgagcagaagggaaggatgtcgatttatgatgcgacccagatgccggccgcgcttaaagtcatggaagatgctcttacgtgaaggagtctagagtagtaagcaagatgtagactgtatcacatgagcatttagacgggagattcgctggccggatgcgccaagccgatatcaatccgatgcagtctctgcatatcaagtaatcgctcttccatgccatgtttgcttgatcccttgcaagtttacttgtcaattgacaggtagatttgaaccgtttgttaaaaagggacgagacgggggggatgacttgctgactgatcaatttcgcgagatcgcttccgcgggttttgccgattcccactcacgagcctagcctagctatgttgccaaacatccccggcgacctcgtcgacgatttcagctcgatcgatggatcctatcatatcatctcttctccagcgtccaacaaaaacctgaagaccgcatacaaatcttgcgcgctggtcatatagagcaatatcatgccgaacccgaccatcgtcgactcgcggctgaggggctcaccggcagtctgtccgagctgcacggcagagctcgatttcgaacgaccgcatgcatacgagggccagcttcaagtccgatgcgttcggtgcaagaacgttttcccctggaaaccggagaactcgggaggaggtagcaagtacggcggctctggaaaggctggatcgggcgttgcgaccagcggtcgaccgggtaccgatgaaaaccccaaggagacggcgtactatgaaatcctcggagtcactcccaaggcgactcaagacgagatcaagaaggcttacaggaagatggctataaagctacaccctgacaaggttagatgaaacgtcgatcgttttaccgaaacctgatttctgacgccttggatggatgtatcagaatcgaggagaccccgatgcggatgaaaaggtaagccatcgagattactgtccaatttggtatcaaacagctccaacctctcattgcattgtgatctgttagttcaaagacctcagcatcgcgtatcaagtaagctgcgactcacagccggctagacagcgaacgcatccgagccaaccttgatggctttacaggtactgtccgacccgaacttgcgtcacatctacaacctcaacggtcaacgggctggaggtggtgtagagcccgccggtgggttccaggaccccgatgtcgtcctcgggatgatgttcggaggagagcgattcagggatctcgtcggcgagatcagtatcggtaagagctgctgagagtgtctgcatcacgactccttgagatctgaagacactcgcttgctgttatcaggtaaggacatgaaggacgctatggaggcggaacagcaagaggcagaggaagaagctgcagctggaccacgagcggtcgatgcgaagggcaaacccatctacacgcccgaagaggttcagaagaagcagcaacgtcaaaaagcgctcgccgacaagaagactgaagctcgaaaggccagagtagagaaactttccgagaatctgatcaacaaggtctctatatttgctgagggtgccaagtcggaaaccgacaaggcggtcatgacgtcgttcaaggagatctgtcgattagaggcggctgaactcgttaaggagagttacggatgggagttgctccaggcgatcggaaggacctacatttccaagtctgagtaggtcatggctcgtcccaataacgagagatgttgcagctaattttcgtcattttgacatttaggcaattccaagcatcctctacttttgctcctttcggttggttccatagcgccaaacaaaacttcaatttgataggtgacacgtgagtgaagctcgttgcatagaaaagtgcgtcctgttgatcacaagtctcttcgacttagggtttccacacttcgagcaggtgagagccttgttatcaatcacgaccgcgcttccctgacacgttcgttgtattttagcacttgagctcaaggccgtctttgagaagctgcagcaagccgaacaatctggattgtctcaggaagcgatccgcaagctcgaagaacaagctgcggagcaggtgagtctcgattacaccgttcccatggtgtttcgtatctaaatgttcctcgaaatcagggtatgcgaacaatttggaagggtgccaaattggaagtcgaatctgtcatcagggagacttgcgacaaggtcttgaacgacgcagccgtgaccgagaagaaacgatacatgaggtctgtcgggctcaaggttatgggagaagtaagcactagaatatcccgcgcccagtgttaacaacgcaggctgattatcacatatgaatcaggccttcgttgctcagcccaaggaaggcgaagagatcgaaaaggttgaggaggctgctaagccccctcctccaccaccggcacattacaactatcctcaggacaagactcctactgcacacaacactactaccaggggtatgggtagccagccccagccacctctgcccccaagacctccccaggcgtccgataaacccaagtctaccgctccacctgtacctaccggtcaggcttctgctccagctcagggtccacctgcattgtctcaacggcatgagccgagtgccaagtcgtccggtacgcaccccgctgaatcctcttgagggatcaactccatgtagcttatcaatgtcatgtaattgtcggcaggctccactccagccccgtcctccttgctactgttcaccacctcgcagacccctcttgagccccgctatccccaccctgagaaacccaagctactcatcccatccttcattcacgcttcgcttcactcggctctcgaccgcgcaccgccaagcttcaaagtcaacccggacggtgttctgatgattcccgatccaagtgacaggatcgacgacgtcaacggagtagtgcctccgcctggacctgttacgcaagaatcgcgaggaggcgaggcgagctttatggatgctgagattacggtcaagatgtacctcgtcacgccggcctcccattcgatagagcaacagaaggcgcaagtcgctcgggctttgagaaacttgatgcactacaaggccagggacaagcggtggaatgggagggctgcccagcatatcgatacattcctcctcggctggaaaggtatcgaatacaccggagacgagcgtgtcgatgctgaggacgtcaaggcccgagcggcgagctgcggaagtgccaagcttgccagcaggatggccgccgaggctgagcgagaagcggagaggaagcaacgggccaagaggggcgagatcaatgacgaggagaagaaggatatggtggaactttggcaggtccgtcttcacacccggtgctcaccgcttgatgacgcgtaaactgatttgcattcctaaaaccgcaggcattgggctctcttgtgccgcaggctaagcagattggagttttgtctctcccgttgcccttgttgcagctgttgtcagaagcgagttcgacatcttctcagggacatattcctgcttacaactcgcttcgttcccgagctggtgtcaaatcgatggaggccgaggtacatgacccgacaccggacaccatgtcgtcaatgtcgacatctggaggacaaatcgacacgaaaaagcagcactccaacgcgggacaggctgacaaggatctcttggacgaatacatccgaactccacctaacgcttcgccgagacacgggatgtccaggttgccctctatgaacggcgatggaagtcggaaggcgagcgctcctgcggttaacagcttgagcacgccagaatgtcagagcctgccacaagagttgcttgactttgcgcgggagaagaagatcgacctatgggctggtagcactggagagggaagtgaccctttgccgtccgtgcacctccataacacgctgcaggagtttgtgaatcacctaccaaaggaagtgatacagcatagcagcaccttgggaacgctcgtcgacatcgatcaggatgtcgaaaacggtacccgtaagcaattgggagtcgatgttgaatgggttctgggcgtaagcgattgcggttgtgggcttcaatgccgggaaggagttttggctgatccggtattactatagtacaccgttgtttcaaagacaaggaacgttgtcgaggataaagggtaagtcgagctgtcgtcgtgcctgcttgcgaaaacgcagctgacgatccccaccccttccttcagattcattatttctgctgcccttgtataattaactccgcttgcgaccgtttagattcttgccattcgattacatcgattcatgttctaagcatcatctccggttttcttcttttccgtttcacgtgatgtcagttggatgagcggcaattacccgccccgcgcctcatgagtaagataagggtcatcaactcctatcaacttacttgacgttaagattaccctggaacactctgactatccgcaagccatttacgaggaaaggaaacatagaacactgcccgatatgccttcaattcccatgcagaccactatctcacccaacgaccagtctgcagtttgcactcgacctctggtcagcgcagagcagcttgatgtcctcatctcggacgctgtcaaggctcaaaaggcgtggaagaaagtatcaattgacgagaggattcagatcgccgagaaatggatggtcagtacggataccttcagatgagagagtttgctggactcatgatgtgtgactcgacggctataggtggaattcgagcgtctcaaggacgtcctgtcggaggaaatcacagtgcagatgggcaggtgtgtgcacattcctgcatcgattggacatagacctgataggtcttcgcacttcccagacccatctctcaaggaccaggagagatcaacggcgctctgtaccgagcaaagcacctgattggcatcgcaaaggactgcctgaaggacattccgcagaccgctaccgacacagacgccttgaagcgttacatcaaacgagagccgcttggcgtcgttgccgttgttgctccatggaagtaagtcaagataactgcctgatatacgatggcctccaagaattaatggtcctgcatcacagcttcccttacctcaccgtcgtcaactcgctcgttcccgccattctcgccggaaactcggtcatcatcaagccctccccgcagaccccctcggctgccgagcgattcatgaccacctttgccgctgcaggtctgcctcagagtgtgatccaggtcattcacgccgatatgcccacaactgccaagctggcagcagacggtcgggtagggttcctctcgttcacgggatctgtagcgggaggcactattctcgcaaaggctgccgcagagggcgaaggcttcaagggcgttggtctcgagctcggcggaaaggaccccgcatacgtcagatcggatgtggacgtcaagtgggctgctgcagagttggttgacggtaagcctctatgtgggtcgagctgttcgcaggaagtcattgaatccaggtttcgcttgatgatgtaggtgccatgtacaactccggtcaatcgtgttgttccgtcgagcgcatctacgtgcactcttctgtctacgacgaatttgtcaaggagttcgccagcgttgctagcgaatacaagctcggcgaccctaggagcaaggagaccaaccttggaccagtcgtcagcctcgccagtgccgagaggatcaggaagcaggtcaaggcggctatcgatgccggtgctaagaacctggtggacgagaccaagttcgaggcggccaaagagggcactacctacgtagcacccgtcgtcttggtcgatgtcaaccacgagatggaagttatgatggaggaagtgagtgactgccgcctgattgcgccttccccttcagattgctgatcgagtgggatttgcccatctagactttcggacctgtcattggaatccaaaaggtcgactctgatgaggaggctttgcagctgatgaacgactcgccttacggtctggtcagtgacgtccggcccgcatgatctggttcttgtcactaacggcaagtgcttctcgttggcatataaaaagactgcctcagtatggaccaacatcgagaaccaagaatcggcagacgccttcagcatgttgtctagcgagctcgaagccggtaccgtatttctcaacaggtgcgactgcttggaccctgccttgtcctggacgggagtcaagaacagtggacgaggagtcagcttgtcagcgttcggtgagcttgggttgccatcgcaggctttctttcgcatgtctggctgatcgcatgggcgtttatcttatcacaggcttcgaccaactgaccaggccaaaatctatcaacatgaaagtcaagactgtctaaatgcttgtatgacaggtgcaatattgatgctggtatcgtatgcgaggcgtactcacttggtggataggccgtggatgggccatttgacaaggtctctgctcctgtctcgcacctgttttcacacgacgttttgcatttgctcttgaccatggatcgactcacggcacatgaagctacgcgtctgccttcttaccttgtacccgctttctactcgctcgaggccatcatgttcgaaactgtgcggacccaagcaacgacgttattccggataaagaaaactgaagttggctcatagacaaaggtggtatagccagacaagcgtgagctagctcaagctgtaacactggcgcttgctgatatatacggagttcagagtacaggtccaaagtacgggctccaccgcaaacttgtttcgctcgcatcaggctgacattgcgccaaatgaaccactcgaacaagatttgagctcgacttgaccccgtatgcgtacagacacgttgagcagctacagaccatattcacacgaacagaacattcattacaaatacttctccagagaagttgttttctccttgagttgtgttgccattgcaagttcgaggtccggttctcgacttcaaaccagtcagaggtgaaaccgaacacgccgtcgatagactttgcgcgccggatccgctcgagtcggtcgaacgagaggcgacgaagtttgagaacgtgaggacatctttggtttggtccgttcacggtgcttgttgtttcggcctagaatcagctcggctacggatcccggttgaaaggttcgagatttttgtccctcgacggcctgatcggtttttgggtttcgtggcggaggattgggacctctgacacatttccgctggctggataatcgtttgcgaagccatcttccattttatcgcattccgcttatttggtaagttacgtcgcttgactagcacgccctcgcatcgcctatctcctctttgacggggcacgagccgtctctgggtcgattcttcctcgagctgctgaaagcttggcaagctgccaggcttgagacggatctgtatccctagattgcttcaaggaacaagatggtagtcctttgaagtttatcgcccagctaagtacataaatctcgcgacatatcgatcgtgatcgttgcgcctacgcctcaggaagcgcggtcatctgagctctgtcctaaatagcaaacataccatgagtacgttagctgaagtgatatcaaccttcgacctgagtaatcgggtgacgatttcttcgatgtcggcgcctggaacgagctcagaagcacagctctgttccatcgactttctgctttcaagggaaagctgtcgaagccattgagcatcgtaacgtatttcggaactacccacgggcaaagtcaacggcaacccgctcctcacggagggtcgatcgaaaggaaggggcaagccgaggggtcctttgactctttcagcctgacctggcgtgtttctccgaggaccgaatgatccaccaggataggcgaggcgggagacaacgacgaggacggtgcgtcttcagacggcaacctgcatgcacggccccacgtgggtcgctcatcgtttcaatcagcagtcgcaaaaagccaaaggacgagcggggagacgtcggactgatggaaacgattcgatgcgattgtttctttctcgcgccagagacaagacgaaacgcgagaagcaaaatgattgatgtcgccatctcgctccctcctccgcgctcctttagcgtgcgtgccatcaaaatgatcgtttccatcaaactctcatcaaaccacttgtggaaggaaaaaacaaagagacgaccaaagggggaacaagatccacccgaacactgaaatatataaagaggcgaccacttggtactttgccatcaacccgcgacccgtgcgacccacgtctaccatctcgatagattagcatcttgacaaatcaaaaccgtcgattcgtcataccggtagacatcccttgtcgtcctagcctagtgaccacccgacactagtcagctcgtgtctcttgtcgtcatcgcggcctcggccgaagcttcacgatagccccgtcatctcagaaaccccagaatccgcaatcaactgttagggcgcagaggctagtctcgcgttagtatccagctccactacccctccccctcatttttgccccatacaaatactacggaactgtcgtgtcgcaatgtcgcggaacatgggatgctgcgacatgggctgccccgcgatggcgggtcacagcgtcattccgcggaataaaggtcttccactcggtcggtatggcagtgccactgagcactggtcggggacttggctaaaacgccaaaagacgagaagagacacagtgatggccgagagcggacctaaatgaaagccggtattgttgtgcgagatgagacgatgcgaggaacgattctcagcacccgggagaagagtcaccaagtgagagcgattcaggccttctgcctgagaattcgtgctcgtcaacctttttctcgaccaatgacaagccagttgaaagcgagacagctgacgctcgatacccatgacttgactacccctcagctcgcctccgtgacaagacacgcaccgacgaccgccgcacccttcggacccgcaaaaaactcggcgttacaaagacaccgaggccgaaaacacgaacgtcacaccaatcccgctccactttttttttactgctcctcggtggctggtcttagtcacgctcggagggccacgtgtttatctctcgtcgaccccgcacacggcctactttttttctcttgcttggagtcgcgcgagcgaaaccaggaagtacgacggacgatctcgagctcgacgaaagaagagttcacagccgttcacgaaggcctgggtcaaggaagtataccaggtcgcaagtcaccgatacccatcatttggtacgtactcgtacgcattcccttgccgtcgtatgtgactcctgtgtcgatgattggctcgtcgggagcgtttttctggcctgggcgaagcgggcgttgggcatcggtccgagaggaaaaaaatggaaaccgagatgacgagctgtttcccatctgtggagttcgggttcctcgggtcgtttgtgtcgcacgacaaagaaacattcaccagtctgcaccacgcgttggttccgaaaagggaaaaacaccattgtggtcgagcatttccatcggttgggacgaacacccggtaacgagtcgaggttggtcgctcgttcagccccgagccggacgtctcgatcacacttcgtcgatcacttggatccactcgaggtgcacacagccgggtgttctccatacccatgcagccagtctggtagcgaggtggggtcggaggggcgtaacattcagcgacccggatcggcgtctgtgtcagccgggaagcagtacgtctagttgtcaggttcatttttcaatgagtcctgctagttctcgcctgcgggggttgggcggtcatcaggcgcgagacgttttcgggatcagatcgcaaagatccctccctcatcgttgccgtaaccacttgcttgcggaaaaaaacacgggtgggggcaaacgcacacctgcagacgaacggcgacgcccgcgcttgcgccatccctccaggaaccccccttcgaggcgagagagggagggaccgttttggagctctttcgaaagtgtggacctgtagacatatacttgaacggccagaggggattcgtactagttgcctcgccttgtcgtgttcgaaacgtcagccgtgaatcttgggactgatctgtaacaacatatactagcaagcacaatcacctcgtacgccctgtccactactacgaccggacttcggcatcactcttgctttttaaaaaaaaagtagcctttcgccggcgaaaacaaccctctcggccagttccgacttttccaaaacaacccctactcttcgacctttggccgactcgattgactcacgcttcaggtggaccatcgaacatctcgtaggccttgtaatgtgagtgttgaatcaatgacaagagcgtttccttttgatgaggggaactcattacgaagccttccgcccgcagccgctgtacactagctactggtcgtacgagcgaacatccctttgcctctctcagctacacatcgcaaacatttccaccctatatcgtctccaacatgacggcttcggctcttcctatccggcagaacaacgccaaccagaacaacgcctctcatcgggctacgactagctctggtaaaggatcctcgcccacacggccttccatctatcctgtctcgccctcgaatcctctctttgccgacaacatgggtggtgccagcccaatgtccttcgggatgagctttaccggcgccggcgggatgatgaaaagctggaaacacagctttattaaccaaaacggagccggcggaaggggccagagctttggggaccgcaatgcgtttggttcctacaagaacgcgaacggcagcttcagtggatacatggacgagtgagttcagacatcagacattcggctgcgtctcctttgctgtagcttacgcattcctcttcagatcaatggacggctccgacccttttttgagctcgaatggcgattcgacgatctcattttctttcaccggcaggaacggctcctttcggtcgccttccgcgctcggaatccctatcgtcctcggtagcttcaatggaggccaaagctttggcgctggcaagagctacggcggcatgagcatctctggcaagagctttaccggtagcaacaccaactggggccgagtcaagagcaacatcatgaaaaaggaagcagaatttgtgagtcagagctgtagagccgtaggtcctggcaagcagtctctaactagggaaccggttgcgatttagtgcaaggactttatgtgctgcggacaagacttgggcaacctgcacgatctgctcgaacatgtaagagcgtgacctcccctgggcgtaacggtcggtcggtcctaacacgcaatcatttctgcttgcaaagtacgaggaagcacacgttgtcgttgtcaactcgccatcgtctgcttcccaaatggatctttctcttgaaatggacgccgatagcaagtgggcgtacggtggcgatgagctcgacgttgagatggaagcactggatgaagagtctccttcgtctgggttcactactgccaccaactcgacgcagacctcacccgcgcccggtcacgcaacccctggcttgatcgccagcaaccaatcgactggcaacgcgatctcgtctgctctcaacaatctcgccctggacgaaatgaacaagtccaacgcttcgtccgctcctcctgtcaaccgttccaagtcatccgacgagatttcggcctttgacagctttgtggtctcgtcgcctcccaaagtcctagaccctgatctttcttcaaaacctaccaaggtcaagcctgccaacctggctgcttctcgaagagctttgcacggtggcatcaacgggcgtcctaccaatgagaaccctatgaagaacgctttcggtttgaacgtcagaaggcagtcacccgagcccgccaagaccacgaccggttttacagccgttgcacccaatgtacttttcacgaacgccaatgcgtctgctcccgtttcgcctgctttggcggaagtaacggctactacctttggcgctccatcccagccggaagcgacgccgtctcccgtcagcgctcactccaagcccgttggatggaaggtcccagctgccgcgactacatcaaccgatgtgactcctcagccttccctcttttcgactcatcggcctttccgatgtcctcaaccgggatgccaaaaatcgtacaaacaagccaacggtctcaagtcagtactgtacggcctcctcatccgtggttcggtacactcatcagcagcctttcttctcgatcagataccatatgcttaaaggccagtgcaactttgaagttcgagatgctatggaatgggcaggtcttacgcaagaagaggccgaagagcgagccaagccttatgcttgcgctgctggtgacggatgcaacaagaggtatcgtcaagccaacggtttgaaggtgagccagccgcaaacggcgtgttcaagattatgatcgacgagactgatgatgacaccctttgcgcagtaccactacatgaactcggggctccatggcgagattggcttgattcttctcgcccaggggcaacaccccatgcccaacatgaacccaaaggagacgaaaccccgaccttcgccccacccggccgcagcgcgacccggtgctcgagcagctgggctggcacccggtggttggatcaaaaacgctgtcaagacgagcggtaaggagctcggcctgcctctgagcggaaccgacaaccctcaacaacgaaaaggggaggatgccgtcttgttcagcacggacgaggcactcgcactctaaatccccccgggaacgacgactcttttcaaggcgtaaacccctacgaccagccttgtgtacttttacacgcgccccatttagttgttatagtacccctctcgtcggtttgtgtgatgctccctttacgttgtactccatcctctaatatttgtgcgcctcgctcttctaagcgaaaacatgtacgtcgaatctatacaacttgtgctatcgtatattgctggcttgaccacagatcagaatctcaccctagaaagcccgtataccagttcattcgtccacttgcatgtcgtcccccctgggctccttctccttgcccttgcccttgccttgttttgccctgtccctgtcgagtcgctcgcttccctgaaacccaggcagcataggtatcactttcgtgcccctccttcttccagtccgcattcccaggacttcggcctccacactcttctctatcgcctgcatctttctttgcaacttctcctgttcttcccgctcgtgtacgtctcgaacgccgccagccgttcgctcgatcggaataccatcctctgggatctggaatgctgactctgaaacggggtgcaggggatcgggggaaggagacctgggcaatccatcttccccgagcggagtaggagagagggagaggggacgaggtgcggatcgtttcgtacccggtcgaggtcctggtcgctttttgggtttgcccgactttgtcaatccgaatggagcttcgatagagtcggccacaggcgtcgcggcctcatcgtcttcgacccggatggcttcgtggtcagaaagctcgtcgtccatgtccccctgctcggtctctttcgcccttttgctgctgctcgctttggccttaggtaccatcgcacggaatgtgattcgccgatcggttctgtcaaatggagtatgggtggcatcgagagggttttctgggtctattgttcgtagtatcagatggtgattagctcaacgcgacggtctcccgatcgtgctaggtaagccagactgaccctttttcgtgcgaaagagaatctcactgccgatcagttgatcatgaataccgcagtagacgtgatttccgattttcagccacggattgggtgtgtccagtccctgccaattcaatgttgttgatcagcgtgagtctgacgaggactctcctgttcagactcaccacgagttggcactgatccgctcgcatcaatacagttggcgagacgtaggttcccaagtccatggtcacatagagctgtattaagcgatatagcacacgttcagtcgagctcgctatgggtctcgcacttcatacacctggctcacctcttcctcgatatcctcatactcgtcatcatttgccaatgccgcccattccgtatcagagacttgtgtccagccgggacccagtagtgattgcgatgttccgctgtgcgacatcttctgctgttctctgacgtattcttgaaagaagcaggctgacggatagataaaagtctgtcgagccgtatacatgttgtagagtaatcatgaaggtacttacccagttgatcgtcggggtattttaccgggagatacccggaagcaaatacatcaacggaagcaaatcctcgatacatttctcaccgagattgagcgtattggttcatatctgcatgtctgatgcggatttggttctccgaagtgatgtaaccacgagtcagctggtcggaagaaccttgccggtccactatccaagccatgttgtgctttatcgctcacggtcagtattcacttggcaacgcgatcatgacttcaatccaattcgaccaagacaatcctttctacggtcgtctggctttctaccgtctgaacgtcaaacactttggcctgatcctgctttcgcttcctgcgcaagcacgtggccagctttacaggcgtcgctacggaacctgtgctttcttctcgctgtcgaatcacccctgcgagtatcaccaactgcagctgggctcagacgaccggatttatcttgacctcaagaaaagacctcatcacaagaagggaaaaacacaaagaaaagggaaggagccataaagcgagcacgacgctgcaaggttttccccaataacgtctatagtccatctcgcgtgatcaggatcttcacctagacacctcattgccgaatcatcacgtcgtccagcttgatcatctaggcggcccgagtctgcctgtactcggcttccgcagcagcagcagcgtcggcaatatcgccttgcacgttctgtttcgccgaggcgacacgccaaagtcgagtaacgctttagcatctcgtcacgattgtacggtctcggacttcgagaatgacataccgagagggtctctgcggcggtgctgaaaaagatgagctgggcattgacgaggtttgacaagttttgcagaggttcgggctgcgtttcagaagtttagcgcgatggtacttgcgaaactcgccagcgccatgtgcccaaactcacgttctccaaaacggccttcatgagtccgatcgcagtctcggtcatctggaccaacttgtcctcggcctcttccacttggagtcggtactgttcctgcttaggcgcagcggccgacttcatgctgtgtgaacagaccgggtcgttcaagatgaacatgatcatcagtcatgatgcgatgcgacgtcattaggccaggaagggtgggcaactcacgcagatcgagcggaatccagctccaacctggcagtcttgacgttggctctggccttcatggcgagcgcaatcgaagacgacagagtggcctgccaaggagtcaagaacttgtcgacaatgacgtggtcttgctgaagacgagcgtctccgacctttcatcgttgagcggtgaatacacatcatgaccaaggatgagccctgtctttcgcctagatttccaaagcaagggcaagcgcgactgaccttttccatagcctcggcataggtattcaaggtcttgcccaatcgatcttccaaaccgacgttgagcgctccggcctttgccgccctgctcagagcgtggggcaaggtcttgggaggagcaggtggggtctgaccaggctcagcgggcatggggacgttgacgggcaatttgacgttctgtatgacagcgaccagacgggtcaggactaagaggtattctacgagtgtgttaggggctcaccttgaggttgttgtgcgcgaacgacgaccatccttgagagacggtctggccgagctcgctcatagactcggtgatttgcgtagggtagtcgtactgccgtatcaacgagccgggtcagctcgtcgaccttcaaccccatcgtaatcgccaaacagagactcacagactcggattcgtgaaccttggtgatcctgatagtgtacggcacatgtgagctgaaggtgacgacgcagtggcccaaagcgcatgattcaactcacttgagcattcccttgtgcaagtcgttgagggcatcgactcgagcctcgagagccttgtactcggcgggaagcctacataggttgacatgcaggaacatccagccgtacgtacacgatcagtaaagctgtgcctaaaggccaaaccctatcacctcggcctctcctagctcccgccacgactcactcggtcacatcgttggggtcgacttgtccgaacctctcacgggtactctgaacggtattcttcaggttcttgttgatccctgagaggtcgaccgaggcaacggacgaggcaagggaggcttgaatggatttccagctggagagacgggacgtgaaaggagagagtaagcgggagtgatcgaggtccaggtcgttcacgagggtcctcatcccagacgagacgtacctctgcatgttggaaggtgtgttctggctgagaatttcgtatctgatcaggacaggaagcgagtagggtcaccgagtgtagagcattgacagggtcttgtgaacttgcgagtagctgatggacttcctcgacgcctgctgctagctagctggaggtggtggtgagtgattgtccggaagcaaatggaatcaaaacgcgttcggttccggatccgaagtacaaacaacatcaacaatatatagcaagatgatggccaggttggacagttgcgcagttgtcaattgaatatttcaccgagacccaaacaatcatatttacagatcagcgatcataggaagaaatcgaatgtaaagtatcaagtgacgagacgcctgggacaccaggtctattgatggaaagagaaggcaggttgagcactactgggcagacccccggctcagccccgcttgttggccatcttggcgcccaacgcataactcggcgaatcttgtggactcgccgcggcgtccaataattgctatagtgacccacaaagacgacgataccagcttgtcagcgtcctacacttttgcggtgtggcccgaccaaacttgatcaactcacgcctccgtggaacgtctgcatctcgtccgggccgaacaaggcgaaccctcccatacccttgcccgccatccccgacttccccgcacctccaaagatctccccagcttcggacctcgtcgtcccgtcctccgcgtagtacccttgtccgggtccttgccgttccgtgaccgtaaactcggcttcctgagcgtcctcttcctcctcgagcgccaacgagtcttgccctacgcctccagccggttgacgggagtatcgttgctgctgctgctgctgtgcctctccgtaactctcagtgacgtaaccctgaggcaaagcggggggtggcatctcgtccagactatcatcaaacgactcgtccaaaaagtccaactggggcacagtcgatcgtcgatgtttaggcatacccacggtcgagacgtccgggtctacggctccgtccggcctcacagaggaggaagaaggtggtagaggttccgtcatgcccatcagcggcgagtcggtatccatcccgagatcgacccccctgatcccacgttcgagtcgaaccgtgtcgtctcccctttccgccaactgctgggcaaataaccccccgttcctcgagggcgatttccccaacgacctctccgccgagtatctcgaaaacgctggcggggtcggcattccagggctgtccatcccttcgtcgtccatcatcaagttcctgatgacggctttggcggcctctttcgccggtgtcttgctgacgatcgttcgatccggtaatccaaagttcatcgtcatcggtggggtccctcccggtatcatcgcttcttccgggtcggaatccgaatccgagccgaacgtgtcgccctcttgcagacccgtgccgcgtcggggtgtacgttcggcgtcagtacgggcgtgggacgagggtctgatcttgggattcaatggcgtgttcctcagatccgcgatcccatcccatgccgccggtctcgctgacgacgacgacgacgacgacgacgctttgggtcgggctggagaaaacgggttcatcgtcgccttgggactcttgaatccgagtcccaacctccccgtcgctgtcctccccttgggcaggtccggcagttctttgttttccgacaacaccgccgacttgtgcgccgaactcggttctcgctgtccctgagctgcacctaccgggggatgatacaaagacgtcgacctatccgtccggctgatcaagaccgaaggttcctcctccatcccctctggcgtctggtacggctcgtacgcgttcccatggttcgagttcgcgtccctcgctttcggagtattcatcgttgttggcatcatcatctctcctggcagataactctcttccccacccgtactgctcatcccttcgtcattctgcaggacctccttcatcttcctctccaagctcgcgtagggactctccatactgctcatcccttccgcccagggttcgagcttgccgtcccgtccttgcccatattgacgttgttcggccgcttcgaggtgttgcaagtggtgttttggcaagggtgtcgaggcgatcgggtttccgtacaaaaacgagtgttcatccggggtcatcaaccccgtctcatcgccgagatcatgctcatcatcccgatcggcgtcgtcttcctcatgtacacctcggtgattatggtggtggtgctgtcgaaggggtgcgatcgtcgacccagtttgatcacccgtctgatcgagcgtctggtcgtactcggcatggaacccctgtccggcgtgcaacgtcgatgactcagggtcttgcgggcgtcgggtctcgtgcgtcgtctttccaaaggcggcggcttggaagaacgtgttccagaactgcgtcgtcgaacgcgggttgtgcgtatagacgtagcagggataaccgatcataagagagagagacgagggaagggttcagtgcaaagtcggcgaggcgtaacgttgcgtgcttcgaccgtcgggacgttggaacgcacctgtgatgcctcgcgcgtaggttcgctgacgatcccgtgacgtttcacctggggcaagatcttgttattgacgacgtcatggaacctggcaaagttgtgatcaatgtcttgtagtaaaagagtgttgagttgctcgatctgctcgatctggacgctgaggggttatgaatggtgatacaaggagactttgaacgtttagctcttttgaagcatggatctcgacgcggagactcgcctgataggatcgtccggattgacgttggcgacctgaaaaaaggggtgttgcctgagcggattgctcattttggttgacgatcgacgtttgtgctcgtcgggctgtagaatcagggtcgtcgtgatacgtgatgatggctcggttgtacgaggtgtatgcggttggatgtcaacaagcaacaagctgcaagctagtgtgagctagacaagtagtgttgttttgaatatgagcaagcagcagcttggaatggggcgacgtgtatatagtagcttagtagggttggcgactgagtaacggcatacactcactcactgtgctgacgggttcccttgaagtctcagctcattcccccccctccctatgatcaacccatcttacgtatcacccctcactaccttagtgcgatgagtaggtgacatgggccgcgaaagcgatcaattgaccattcaaccgtgaccatttacatctcgaatcaaaggcggataaccaccaccaccagtacctctccacacacatttctatcactacgatcaaatcactaccaacatgtcagtcaaagacccaatcactggaggttcaggcaacatcgggttcgatttcagtaaccatgcgaggaaccaattcttaggcgctcgaatgggtggacttcccaaaggtacgtccctgtcacctcgtcccgatcttacacgccggtccaagagcctgaccattgatacggtcgattcttacttctttctctgttagccacctcgacggggacgaccatcgttggtgtcaagtttggaggaggcgattcgggggaagaagaaggcgtctgtctcggtgccgacacccgagcgacggggggtcccatcgtggccgacaagaactgtgaaaaggcgagttttccggatatttccaacgctcgtccgtgcatgcgggaccattgatgctgatctcttccacaccttgcgttctcgggatgatgcgcacggggcagattcattacattgccgatcacatcaggtgttgcggtgcggggaccgccgccgatacggaattcgtcaccaacctcatctccagcaacatcgaggtcagccacatagaccccccccccctattcctattcgtcgagataggtcgtcggtaggcgagagagcagcgcaagacgtttagcctgtccatcggcgcaaatacacatggttcgggatgacctcactgtcctcgccgctatcgcactgggcgaccttctagggcagccgggatcactcacctgacaccccgttcgtacgccctcgttctcggcgcactgtcgatgcgatcgagggtttcggagtgaaatcccgaagagtcccaatgcgagttgagggtcattggacgagatcgtaccaccctttcggtcgaggtatcggtctgagaacagtatataggtcgggggtttctcaagtcgttcgtcggttcatgaatttattttccctcctcaacacaaaccacttccacacaactttaacaaccaaatacctttcacatctccactattatgcgtacttctgccgctgctgccctcgccatcgcctttggcgccgccaacgtcgctgctacccctgtcgccaagaggatgaacgacggtggtgttgacgatgtcaccatcttgaactatgctcgtgagctcgaccgcatcctcagtgctcacctctccagccgctgacgacctcggcctgcttcaaagtgactttggagcacctcgagaacgctttctacaaggaggctctcgacaagttcgacgctgccgctttcgaatcggctggattcccctcttgggtccgaggccgattctcccagatcgctgagcacgaggcttcccacgtcgaggtcctctccggcgctttgggtcaggctgccgttcagccttgtgcctacaccttcccttacaccgaccccaagagcttcgccgcccttgccagtgtcatcgagaacgtcggagtctctggtgagtcatccgtcgcttgcacgtctttcgtcctaggtcctccgctcacttgtttccctcgctcatatctccagcctacctcggagccgctgcctcgatcatggacaagacttacttgaccgtcgccggttcgatcttgaccaccgaggcccgtcaccaggcctggatctcgtccgccgccaacatggccgagccttggtcgggaccttacgacactcccgtcgccttcagccccgtcttctcggttgctgcccagttcatcacccccaactcgtgccccgccagcaacgctgctcttcccttcaaggccttccccgccttgacctacatggacggcaaggtcgcctttgacggactcagcggtcagggtcaatacgtcgtcctttaccagggattgaacattgccacctaccccatcggttccgacggttccgtcagccttcccgacacccagggaattgcctacatcaccgtctcgaccgagaagaacgccaccttgaccggagacgacaacatcatcgccggacctgccgttgtcgccaacaccttcggcgccgacgcttccaaccccgctcctaccttcacctcggcctgagcgtcgtcgacaggctttcccagctagtcctcgtcgtgtagcgtatgctcgtgtcaaggacaatcgtcataatttcccctagctatcatagttgaaattgaactgaaaagagaacaacaccttgtcataattccgtagtcatcaagtcagattgaatcgtcttatatcccacctttccgcctatcgtcgtccgttcagttctgcatggaatgctatggtttcagccagacgtctttcaacgccgcatcgtctggcccgagttgggcgtgatgtgctcttgcttcacgatcaactcaacgttgtcaccacgaatgatcatcaactccctccactacaagcttctgttcgccaccaaggtgttatcgcctagtccgaagctagttctagttgcggagcgcgagatttgatcccgtcgccgtcgattgaataggtcgtccccctcatgcgttcaggccgagtgattgatctagatggtcaagggttactctttttgatacaatatgcactgccatcacgctatacataccggaacccgttcacctatccagatcaggttctatctccttgcgagtaacccaaaagtcgtggtcgagtcacctcgccacctcgagctttaccgccaccccctccagctttccgactttgtctttaggcggtcgatcgcctccactttttcgggattgagccgggtccgaggccaaccgtgagcagatcatatcgaacatcatacacacctcacgagtcttttgacctagcatcgaagacgacaggttcctctctgtcgctcccgctgcatcgattctctatcatgcagtcgccagtaaaggcatctctgccgaccgacgtgttcccgtcgacgacatcatcatcatcaccactactaccgccggcgacatcgaacgcagccctagattcgagcacagccgagatgccatccacttcgacgatctctcccacacccagtctaagccgagggtcatctggagcggcttccgactcggaagccaagtcgctggctgatggcgaaatggaggtcgaatacgagacggacggatcggaactttctgaaggacaggacgaagacgaagacgaagaagaggaagtcgacctggaccgtccgccgatcccccagccggcttcattgtgaggctctcgcgtgctcttgactcgagttcgattgatgtaacattgctgaaccctgcatctccgatcatcttcactcactcctcttctagctacccacaccaacataatcaaaacatcccacccgcacctggttctcagtggttgtccccagatgacgatcccagcgcttctcgggggatccccatcttccacccttctatggacgaattcagagattttgagacgtacatggaaaaggtcgctccttggggtcatcgaagtgggatcatcaagatcgtacccccctcggaatggtcagtcactctcagattcgattcttaggactagcgagcttgtcgactgacctctttttcttgtgcgatacgctacatgtaggaccgagaccctgcctcctatcccgacaacaaccatgtcgaacctccgcatcaagaatccgatccagcagaacatgttgggcagatccgggttgttcagacagagcacgatcgagaagaagaaagggttgacagtcagggattggtgggaaaagtgtaggagcgcccccttccagtgagtcataggtcatctgtgagtggaggaaacgagcagacaaggctgacgaaagaccgttgggatatctagctacccaggacccaaggatgcggagctgagaaaaaggggaaaccctggaacgacctcgacgaggaccagcaagcggagaaaaggcgcggaatctacaccggtgccttccgagcctgggactgacgagcaggaggtggtcaaacaggaagattcaatgggccttgaggatcgaacaacagcagcgacggacagtggtgggatggtatcgggtcaatcagtcaatagagtgacgtttacagcaacgggatccgagcgagcgacttcgtccgcgccgagcacgacgaccgagctcaaggtcgagactatcgacccttggtacgagacctttaaccctcgttcggactggctgcccaacgagaccaaggaggaagactacaccgaggaagggtatcgtaacctcgagcgcaagttctggcgggaactagggttaggagaagcttgttggtatggagcggacatgaagggatcactgtttacggacgagacgaccagttggaatgtggcacgcttgcccaacctgttaaacaggctgaacctcaagagaaagttgccgggagtcaatacgccgtacctgtactggggaatgtgggccgcggctttcgcttggcatgttgaagacgtgagtttcaggttgcgcagactcgacctggggatcgctgatcaagtcgcaccgggtcactacagatggacctctactcgatcaactatatacacttcggagctcccaaattctggtacgctatcccgcaaaagaaagccgatgcattcgagcgacatatggcgggtgagacacgactcctatccagcatcatctccttctcactaatctgaaccaactatcataggttacttcccttcggacgcacgaaaatgcgaccagtttttgcgacacaagtcgtttgccgtttcaccgtacaatctaggtgggcaagggagtcgacctaatatcatggtacagaagcagggcgaatttgtcatcacctttccgcgaggctaccacgccgggttcaacatgggcttcaactgcgccgagagcatcaatttcgccctcgacgattggatcgagttgggacggagggcaaaagtttgtcgttgcgagagcgaaaagtgagttccgaaaacgaaagtcgagatacagtgacgaatggatcgagctcatgtcataaataccacccttcagcgtacatatagacgtcgacgccgtgctggaggaatcggccctgcgggaagcggcggctcaggctagggaggagcggcgcattaaggcagagcagaggcgcgaggaattgaagcggaaggagaaacgtccgcgcagggatccgaacaagccgagggtgcccaagattaggatcaagtcgaccatcgaattcaagccgcctcccaagccggccaaatccgtctacccgtgtattctctgcccagatcagtccacggcttacctgttgcctgttcatcgggactcgaaacccgttgtcgacaacatcgttgcgcctctggtggctgtcgcaggcgtggatgtcgccgtggaagcagtcacccatgatcgagagagcgacacgcaggcttccgccggcttggtgccaacagtcgctccgacatcccaccgaaagaggcccgagttcgcacacctgagctgcgtccgatcgactcccgagctgtggattgccgatgcatgggatgagaacaaggaacgcagcgttcgtcgtgtgatgggcgtcgagtctatcggccgagagaggtggaacttggtcagtctcactcggttccggatgttcgaattgtcgtttactaataccccgaccgctcgtctcgattcagaaatgtgcctgctgtgccgacgatcctgcccgtcagaaacacggcagcaaagtacaatgtacgaagggcaaatgtgtcaaggcgtaccacgtgacgtgtgcgatcaaggacccgaccgtcgagttcaaggagatggaggtggacgaatggatcgttcagcccgatctcaccccttcttcatcatcggcacaggcggaagctggacctggaccgacgaccatcgccaatgcgtctcgccgcttctctcgggtgaccgtcgtccacgcgcacgtcctctgtccggctcataatccggcgttggcggaaaagaaacgtttggaagcacatcgagagatgttgacgaggttgactttggtaccgtacgggtcccctgtcagcttgagactgggaaccgggacgtgggggagttatctattgagcgtggatggggagcgggaggtcgccatggtcacgaatgataaagggtgcgttcgagggtgacgctttttctcggtatcgtcgggctgactctgttctccgtacttgtttcgacgtcatcatagggttccctttgaagtcaagtggagtcagatcgtttacatcccgccattccaggtcctatcgacgacgccgtcgtcgccaggcgatgagaatggctctagctcgaatatgggcgaggcgaggacgagggtgaggatggttcaggacgtgtcggcgtcaggacaagcatggcaatcaagggtaggcgaggttcacatgaagagggatgcgcagagcatatcagcggaaagcgacctaccgagtgaagaggctgggaccgcgtcgaatcgtaacggcatagccgctgccacggatcgaccgtcaacacaaatctcgacgacgacgacgactgcacactctctgagactgggttcgcaagtcatgttgacgcccgggttgatcggactattgagcgagaacccactgttacgggcctcgttgaaggggttggggcttggcggatgagagcgcgcgaggacacgtgcgatgatcggatgagccagccagcaaggacgatacggggaagccacctgatgttcatcttgatcgtcaatttgtaagacaccgagtagcgagttacgattcgctctttcatttcatgatattacgaagatgtacaacaacgcgagggttatcagattacagtacagggtagtggtggctgctgatgtcgtatctctgtgcggttggttacatcattttggcgcgcgcgaggtgaggtgagtgagtgatgtcgtcaccgcagccggcgtggcaaatttgatcatgtccctctcgagtggaacgactagatatcgcaatgcaggacgaattttcaggcatcagatagaagaggagagtcaagctataccgatgagtgtggtcttggtgtagtccgtgtgtagatgagcaggaagaagaggagttgcaatgagctctgaatctgggagggggaagtggttttctttgaaatccgattccgagacgtcgcgcgctggttggtcggttcgggtcacaaagcagcagctccaactagcaactagaagggagagcaaactagaagtcgacccctcaatactatactacatgaaccacaaagacacaagaacatacacatacatacatagcacagtctccaatcatgctcaaggtacgtacctgtcgatcaggcccaaatcccgactgagacggtgggcacggtacaacggtcacggatccttttcaggagagggcaggatgagtcggaggattgctcatcctgcacctgaccatcaactcccaccacccgtgcaagtcgtatcgtgtacccaccgtcacggacctggtctggtccggatcgctccagccgttttccctcgactttgcatcgacctatgcgcacgtactgactttcgaacttgtcattctttcctcgatcgaaccttggttgacgccgacgtaattagcaattctggccgacgaccccgtcgtcgaataataatgcggccttgcccggctcaggacctgcagatcagacgaccccgagggcagtaacccaatccaaccctttcgatcagcaacagccattgtcgccccagcagcagcagcaacaacagtacaaccagcaacactcgacggccatgtctccccgattagacaccctatcgctgcagtcccaatctcactcccactccccctcgtcaggtgctcgcacacctaccacctcgacacacccggacctgaccctcacgcttcccccgtcaatgtcctcgtccatggagttccgacacacgggaccgatgaccccacccgcacacgtcggcgcttcgaggcctaccacggggatcaccataggggacacgatgggcgggacgtcagggatcggtttcgggctgaaagagccacccaagatgaggcgggccatgaccaaggatggcaatatcgtcggcggggctgggggtgcaaagagcgggttgagcgtctctagtagcgccacgcccgatggtggctggcaggacgatgccgaacccggtcaaacgcaatctcagaccccggtctcgagtcaagagtcgtcttcggcagggaacaacgacagggcacgagcgatcagagggacgttgaccgtcaagctcatctcggcccgtaacctcgccgtagggtccggtagcgatgcattgggatctgcgggaggaaaaccggaaccatacgtcgtcgcccaatttgagcagaacgaattcgtctcgcgtcccgccctcgtcggcgatgccaacaacaatgggcaggacggccagcagcaacagcaacaacagcaacagacacagggaaagacgatccctaggaccaactcgtacggtccttccctggggatcgcttccatctcgcgagcattcgctgacgccgcacgacgcaccaaggggggtgccgcgtcaggaggtggcaagtcgggtcaaggtacagggggattgacgagtgggcagacgacgccaagggctggcggacccgctgcgggaggtggaggacccgccagtcctggtttgggcggttctttctttggaaagatcggaggatccaccgcggaccccgtttggaaggaggacgtttccttgtgagtctctttgcgcactcgtcgcccgagacaaggaggaaactttcatgccgttgatcccatttttcgacgggaaacttgatagcgacgtgacctcgcccgactcggtacttaccatctcggtgtacgaccgatccaaggctggcgagggtttcttgggtgtcaaggagatcaagccagtactcaaggacggagtgaccgtcgataattggttcgccctctctcctcgcggcgaggagcacgtgacgggagagatctggttgcagatcagttacgatgcgctcaaggtgggtctttcaggccagatattcgctcgccttgcacacatgctgaatcgatcatgtaacatcgatgacagagcaagatccacctctcgcccaaggactttgagatcctcaagttgatcgggcgggggacgtttggaaaggttttccaggtcaggaaacgaaacaccaagcggatctatgcgatgaagatgttgtccaagaaagacattgtcgccaagaaggaaattgcgcatacgatcggagaaagaaagatcctgcaacagtcactcgactcgcccttcctcgtcgggttgaaattcagtttccagaccgaggattacctctttttcgtcacggattacaagagtggaggagaattgttctggcacttgcaaaaggagggtagattcaccgagcccagagccaggttctacattgccgagctggtcctcgcgctcgaacatttgcacaaatacgatattgtgtaccggtgagttcatgtgcgtcaagattccaacggtagacatgcgtctgatccatccgcatcgacagtgacttgaaacccgaaaacatcttgttggacgctaccggtcacgtcgcgctttgcgactttggactgtcaaagcccgatcttggaagcggacagttgaccaacaccttctgtggtaccaccgagtgagttttcctctgtccctatcccaggcccacacggcttgctgacatttctcggtctcttcaggtacctcgccccggaggtcttgctcgatgaccacggttactcgaagcttgtcgacttttggtcacttggagttctgctctttgagatgtgctgtggatggtctccattctacgccgaagacgtgcagcagatgtacaagaatatctgtttcggcaagatcaggttcccccgaggcgtcatcggggacgatggcaagcagtttgtcaagggggtgagccaaacgcccgcccatgcggagcatccctacgagacgttgctgaccgacgcccaatttagcttctcaaccgaaaccccaagcatcgtctcggtgcggaacgcgacgctgccgagcttaaagagcaccccttcttcaagtccatcgattggcgattgctcgctgccaagcagatcacacctccattcaaaccgatggtcgagagcgacgagtcggtttccaactttgatcctttgttcacgtcgtctgatctccgggacgtaccattcgactggagtgcttcggacgacacgttgatgagcgggagtgttggacactcgtacaacggcccagggggcggtatctcggttgacaggaccggcaaaccgtcatctcagcccagcgggatgaacatcaaaccgacccggcccggtctcatccctacgggcagccccctaacaagcagcgtccaggcaaacttccgagggtttacttacactggcgaatccatggcagtacgtcgagtatggcctgatacgctgtgcttccgagaaaggctgacccatctgcatccactcgtagcccatctctaacctggcccatggcttcgacgatagcgatgaaggcgagggcgatgagaatgctatcgacgaggaggacgactttgaaccacaggatgaacacggtgatctcgtccgaagaacgagcgatgtgcacatggactgatccatcaggcaggctttgtacctactcaccctacctgccgaccgttgttgtaagatacctcgtcctgaaatatcaaagtataatcaaaccgaggacggagtgcgttgtgctagaacttctgtgtctggtcgaggaattacatgcagcccgcggtggctctcgacaccgtgtaccacgaccaagtgtctaggtatctattgcgcagtcgaaatggttcaagctcatcgaattcgaaatgtattacttcaaaccatacaatcgatatataagactagttccccttgcgttcaactggggtcaagcgaacgttggtatcgtgtaaataatcgtaaaagtcgtcctcgttctcatcaatctccatattcctcttgagggatttttcgagcttcttctcgccttgtttcttgaatcgcagattgatggcagatttcagtgcatccgtgtacacctcgtacttcactatttcggaatgaatgtacagagaacggtgcttccaattctcttgcgctttcgagccgttgaccgatcgcgggggatactataggtcaagtccttgagaaaggttgatcctatgatttcacccatgatccaacttacgaatttggcgagcggcgcttcgagtgccttgtgagcggtcaattccttgattaacgactgcgagtgtttctggagagattcgagttgcgcctcctcgtcaagcttgctagggataagcgatggctgtggcgccttccagtcactaagataatttctttccgcaggcatgttgcgtcgtcccaacgttctatgcattgaaagtcggctcttggcgctacgattgctgaagacgctttgcgagtcggtgtggtcctctggctgatccgagctttcgagtgctttccagccatagtccagatttgacacaccgccaggaagagggggccggctgcgccttgccgcccagtagttacatgttgatacccactcctggaccaagtcctcagttccggcttggaaaaagctcatctcgccgttatgtagggtaaggctgaaacaccatggccgctgcgtgttatagcctggtggcgggagagctgaagctagtgcgtgagagaggttcatgtcgccttggcctcgtgcattcgtctgttttttgctcgacatcgataagctaggagaccgagccgctttcatagcgctcgactcaccatccaattaccgccacccatggcaaggcctttaggaacggcacgtccagacccctcgtcaaaggagaacatgtagatgtctccttgctgcaagacggtaaaaacctgcctccaattcttttccttcgatcgcttgccgggcccatcccagtagggtttgcgttgcaggttgccctcttttgcccaaggtggccccagtagcgccagctgatcgtccgtcatatcctcggtgccatcggtcgtatcagactctgctatacttgcagcctcgtcctcgtgctctctaatcactgtatgcgtcagattggaagcgaacccaaaagccggaccggagggataatgtttgtcgacgtgctgtactcatagccaaaatacggtgatcagcggaagcatgaagatgagtttccggataggggcttacctcgccaatcgacgtcgcttgactaggcgtagggctggaccgaccatcctggtggtgcgatcctggtccaagaccttgcattccgcgcatgctgcctctcttgtgggaactcaagcggtcagagccgctggtatccgaagtcgaccgtagcattgggtgccgccctgccgagagtggtgcccggaaggcgtactcgtgagctgtcggtaggaggatctgcttcgctttgaccgattgatagatctcctgttgacccagtgacctcgaaaggggtcaataaagacgttcctaacgagcttatcgaccagcttacctttagggccgcttcgagttccgcttcccacttgcccccctgttgcgccatggatccgacactagctgaggacgatagtcgtcctctggcatcttgcgaagcaggtactttgccaagattcgtaactgctagcatgctatgccgctgagtacgatcggatactcgctcgacagatgcaaaagaatcctttcgattgagcagatctgaactcccttctcggtcgaaattgatcgctgcacccagtttatggctgccagtgttgtgagcgggcggcgattgcgcggatgcgatagaggttcgcaaggtactgttactgtcgttatgcaccagttcaggtgtggaagcgtgccgtgacatgttctccttgaggacgtgagaggtgatggtgtccatggtaagacgaacgtattgttgtctcgacatgtgctcgctaatttcggcgatgtgcaagtcggtattgagcaagagaaaggaacctgtcacagtatgtactacggctacatgacgagacaatcgacttagcctcgcgaccgtacgatcgctatccgccatgacttacccggcgaggaaaagattgtggatgggttacactcgaagtaccgttgactgaaagcttcaaggattcggtcgatctcctgcgtttctgctttgaggtagagcttttggcaaagttgtctgcagattggacccatgctttaaatatcgggctcttcgacttgatatcggaccggtaacttacctaaaagcatcgtcgactcgcatcccgccaaaagcgaattgtgctatataatattgcaaggcaaggcgattgatgggtttactagtcgatgtcaatttgagaaatcagtatggcggtcaagattcaatctagaaacaaggacttacatcccaccaatgtattctgccatgcggtctttcttgacagaactctcctccccttgaaatgcagcctgcgcgatagtctttgcttcggcatcgagatcttggtgggcttccggatcgatgtccagaggaaacgcataggggtttctcccagcagcgagtggtgtcattccagactgattgtctgccgtcaggtcagtcgaatccgcagccacaggggtacctcttccgtgcaatgtgcttgcatcttcgtcagacagcctcttgatagtgccgtctccagcaggagagggctcgttgtccgtagtctcccgatcatcttcactctgggtgggataacgcaaatgccttgatggtcgtgttggaggggtcgatactgccaagttcggcgagttttgatttgttggggtggtgatcggatccgacatggctaaagaggagacgcgagttgacagtgtgggagccaaggggatttttggtgaggaaccggatgtattggctcgagaaggatgcgagagtaggtcttgatcagctctcaaagacgaatcacccaggggcgactctggcgaagaagccttttgaggagaagatccttcgaaacggtctcgaagagtcatactttgagcaggtacgccgagctccatagcaagatccctctcgatactgtcaccctctagcatcccttccacatgccgacgccattggtccatccgagctggcgtcgagtcacccgcaacactcttcgtagcgctcgaccttcttcgagcggtctccggtcttgctagaacaccatcttcctcgtcgctgttatctcctatctgcgtagcaggttcccttaggtgtctcgaagcggttcttggaggatgtgaaggtgatggaacttctgcatgtgaagacggtatggactcgcgtcctggagatcgcagaggacttgtagcgctgatggcgctgatagcagagtctttgcgaggaggtgcgggtgccgctggtacctgcggcgcggtgttgaatttgcgatccatcgaagaggagccaagcgggaggtgttgagcggaaggtgacggcttgaaaattgggctcgactgtgaggatggccaatgagcacatattgatatcgttattggtgcgagatcgatcgtagattcaccttgttaggcgtctcatcccgattcgaactgaataatttcccccaaaagcccttcgtcttacttcttacactctgccagtgacagtagaggatgcatcaatactggacggatacaaggcgttatcgatagcacgttgtattcaccttggtgccatcttcgcccaacgctgatcccgttcgattcgtcaccgtgctggatttcggactttgcacactgttcgacctgcttgacatggtattcatggatcgctgcgtgccggtgctcatttggcttggaggctggaccgcagccgggccgtgagaggctgatcggtcccggtttcccatgacgacaggtttgttgtcagctccgggagacccctgtcgctgtttggtaggagatgagaggtattctgtggcaccatattcaccctgaggcataaccagcgggggagccagattccgcttcgtcctcgagtcctgaggggccggcgtcacgttgctaaccgcggcttggccggacgtgttgttccggtggttgagatcaggcgtacttgcggtaccagcgcttctaaagatgctccgccgtttcgaaatctgagccttgtcgttcgtggggcctagttcggctggacgtaaagtatagctcaatccggtcagctctggtcgaagcattgtcgattaacgtccgagctcaccgtcgataccgaaagaagctcctttgtgcgtcgccgttgtcgatctaaagtttctgtgtctgtcctctccatcaaaaattctatagctgctgctttctgaagtcttggactggtccgatagatgggatggtcgagatggtcccggctcaggacgtggtagaccgaccgtcgtttctggatgtgttattgtttccgagatcccaggcaaagttgctccggccgagcttccttgtctgctccttggggggccggtgcttgtgggtccgggaaggattctgtctgggtcgctcgagctgacatattgagtgttggcggatcctgtgagagctcgttcgaaatcctcttgtgatcggcgaggtccggaggtcgatgatggacgccgggacattgttgttgttgctcgaatggtgatgaccctgtgaagtgtcggctgatatcccgctgacagggtcaatgcgaacgcatactgagctccgagacggctacttgtgattaattatacgccgctgagtctgtcgactctattcaagggaaggggcattgcaggtcaaatcgacatcttgatccgttgtcgagctgatcagatcacggttcggagcctcggagacaaactagattcgcgctaaaaccgacgtcaaacgacaaaataggtcctcaaaaggtttcctcaatccgctaagattcaccaagccagaaataatatatgaaagggttctgcaagctaaaggatatatgggacggaacaagagctacagaataagttggggagaggagatacacagtgtgctggtgagcaaagtcaaaccgagccgcgacttggctgcatgagcggcctatacgtcgtcgccgctttgttccttcatttcagcgaggcgtcgcctcatcgccttctcggtcttggtaggggcaacctttcgacagatcagagctccgacctgtcatgtatcgcgtgtgagttcggtgaaaatcctgtcggtattgcggactggcttcaaacactcacgattgccatcaatccaccgaaacgcaaggtccaagccacaccgcttgtctgggcgtgatgtcgcttaacgaaccctccggtagctggctcttcgccatccacccatttgaagatcagagaggcaataacagcaatctgttcaagcggcgatatcagtgcctcacgcctagttgttggaagattgagcagactcaccaagaactgagggaacacgatcgcgaggttgtgaatacccatgatggtaccaccagcgggcttcgaaccgccatagtccatctcctcgttgagatcatcaatgttggccatggagaagctcctcaccaaaccggtcctctcgttgggagccgaaggcgggttccacacgacaggcgtcgaggcggcacgggcgtgaccaggtcgaccggcgaatgcacctccagccttgtaaggaggaggctctgatcgaccgggttgcggtttgtctcctccattcttgcctcggtcgtcgacttccttcagatattccataatgatgctgcgatcatgcgtaaaccgtcagctctcgtgagcctactttacttcacgaagaaaccagaaaaagacccacgcgaaaggtctagtcatggaagaaaggtggcacagtttgcttgtcagagatcgtgcgttgaaggatcgcctagtggtactcacacccagcatgcaacagcccagcaaattccaaccagagcgatcatcagagttgcctgcagaagaccgaacttattagtgaaccgcctcagaattcagtcgaaattcctcaatcaggactgacctgccagaccttgttaatgaagaaggtggtaaacatcaaaaaggcaaagagcagcaaggtggaagtccagatgtttcggagcaaaaacggcactgtgacggaaaaactcacccagtcaggtatttgtgtgacaaaccatcgagcgaatttacttactgataggaagcttgagaggcttgccctctcggtgagcttcggccttccactctcgaaccaagtcctgaatgcgcttgagttccttgtcgtcttcgtcctcctcgtccgattcatcgtcatcgtgatggtgtttctcgttttcgggcctcaggagccggtggtctcgagcggcaaggtagggcaaaagaacaccagcgacgatggcaactatgtaggctgtcgtcagcccgatgtcgtggaccgatacgatggagaaaagcttacccgagctgtaaatgaggagagcgagactgcctgctcgggtggcgtcgtcgacattcgggtctctgccgatctcggtggccatgacttcggcgacccaagtggtcgagtagaataggtaagggaaccaccccatgaaggcgcaaatctgcacgtaacagacccgacggacaggcttaggcaggtggatgacggcctcgtaaatggttgaaaagacgtcggtgaatttcctgttaggcaattaccattagtttttcggctttgtcgtgggaatttgttaaatttagggatgagggactcacgacttcttttgtccaaattgctcctcgcgctcttcttcctcggtgaaccaaaccgtagcccagacggtagtaaccagagcgacaatcgcgatgatgcagactaaaagaagcagtgacaatagttcagacacgtctctatatcggacgggcgcgggggacagtcgactcacctttgcggaactgaccgcctccgacgtatttcaagatgggtgcgttggccaaattcaagctgcccatagcgtaaccgaggatgttaccgaagtggctgaatcgaccgtgccaggcactggccgtggcgagctgttcaccggggactacatcgagtgcgaggttacgcagagatccttgtagactagaagctcaagtcattcgtatcagtggaaagtgcgcaccgattccatgacccggttccgagcttacccgttcaaagcaaagtctagtgcgtagaacgcgatgacggcaatggcaatggcagtgctctgaactaattcctgcctctttgggtcccagtcggcgacaccccctctgaagaggtcgacaaggatatccgcgagcggttcggtaaaggcaagagcaagggccgagagagcgagcaagatggtcgccccgacgatccaggaacgacggcggtacttggacaaagatgaatcggaaattgcaccaatcaatggttgagcgacaagcccagagactgttcacgaagatcagcagttgtatctgtgaatcgactcgactcgctaggtgaacttactcggtccagcaagccacacgagggaagtgagttgttccgagagacccaaagacagtaggtaaggtgttccatatcccaactcaacgacctttgaaaaagtaaagaattagatgcggccccggcgtatacaggcctaaagccaacaacgaatgtttgagcttacccaggcaatctgtatgaacgcgtctttatgagctcgtggatccaggcaacaaagaagaaatacctcgacctacctgactaccgcccatggatactgtcaaagccatcaactgcttgaacgtcaactttttgtggcgattcttctccttcttctttgctgcggcggcatcggaaacggctccatagttttgcccacgttgaccattcctaggctcgccccgggctgccctgcttctctcaggcgaccctgaagtgccttgtccgagtcgtagtgcttgcggcttcgagttggaagccgacctgggtttcttcttctgcttcatcaggtcagaaagagatgtgtaggcttcttgagagttcgagtttacggaacggggagagtcgaaggaggcccggtggtcagtcgattgcggcggcggggtcgtagggcgatccatgttgaccgtttgacaatggagaattcgacgactgtaggcagtacaactgcttgcgaacctgaacagctgtactcaggtctagtcttgtaggaaagaatagtcataaagtattgttaaatcggctgtgaagcggggtccaaggttcccactcgtcgcgacaccaacctggaggcaaaccatcgaaatagattccgtaggatttcgcaaaaaccgcatcaacatgatgatgggaatctcgatcacatgcgtcgatcgcgtcgatgaggtcacaccatcatctcatgctttgccattcgtcggagcgttctcaggaatcatgagcattgcatgtgcatttctgatacatacacaagtacaagcactagaaatatgaattaggggtacgattacaaatgctacaaacgtcctgccttcggctgtagatgagacaacaacgatcgcgatccgtctctatgaagggttgacgatcacgaccgggatacaacgcaaccagttcgtcgcccgaaaagcccttctgcgtcttcatcttgtccatgtgaggccggtcgggacgaccagcataccatcctgccgcaccaaagcgatcgggaccttgttattagctcgcgacctcgtgggcggcgccctcggtgtcgaggccgacaggacctcggtgcatttgtattcgttctcctccgcaggttcggtaccccaccaaacggtgtaacgcggattcccctcttcatccttggcaaatcccgtaccgtagctagaacgaatgaaggagagcgcggatcagcttcacggactccatagcgatgtcgaggaagctgctcacatggtcgcttgcggtaacgtcgacatggaaggcatcatggctacatgccgtctagcagtatcgacgttctgtcctccgggagcgacacaccgttccgcagatggtaacggcgtcagcggtgactcgatcttatggtcggggttgacccagaacgtgtaaactttcgtctcggcaccgacaatggtcctgtatcacaaaaggcagcaataaatgatgagtatgagctcgacctcgaaagtcgaaatgacaagacaaaacgcaccaggtagcagtctctgccaattccacaaaccacctcgtgctctccgaagccggggcaatctcccccgatatcgtcctcatcggctttggcggagcaggtgggctcatagtgctacccttcaggctggacgacaagcccagagagctcttgtttgaaacgctcgcgttgctgctcgtccgtctccgtcgcatcggtcctggcccgttcgtttccgcccgattgtccctcgaggggctttccgcaatgccatatggcgctccagctccacccagaccttgactgatggttggctgacgggccatgcctccgaaaaagtcctgaccggccggaacatatgtgtttggcaatgtcgaggtggtggacgtgggtgtgacgggaccggtcccacgtgaagtgaggggcttcaagccggtgatgtgaatattcggcgaggaaggcagactagacgcgctatgcggtcgggacctcggcgttggcggagggttctctggagccattgtccgagcggtcttgccgagccggtactcgatacgatccttttcagccgtcatccactgtccggaatatcggaagtcctgcccatacaccgggaggttcggtaggtttggtacagcatatagttcgagagcgatctaacgtgaaaggtaagagacatgttcagcattcacctagacgatgctatcatttgcgaacttcgactaaccttgtgtaattgactgaccggctcacccgtcagctcccctagcgcgcatctgccttggaatccatccctcttcaccccttcgccaccgtaagctgtggtcccattatccactctgcgaatgaccagcacgggggatgtcaagccagtcgcagggcattgtagccggatggtgttgttgtagcaaacgacaggtaccgggatgttgtcgggtggcttgatggcgtcggcaggaggagcgtatccatcccatgcctctcgtccagtcacaggtggctgcggtcgatcgtgggcttgcggatcgacgagccagatcagtagggctatgaagcaaagttgagatcagctttcgatagggctcggcgtgatccggtccgttgctcacgatcccaggacacttgatcggctacgaaagcggggtccgttctagccatgctaggatgggtagggatcgccttgccgtctgaacccagctgtcgtgtgatgtcggttgccacagacaggaatttggtcgagctcgtctgtgaccggatacggttgtataacgacaccggcgtgccgtgttgcaaaaagactgatcataggcacgatctgctcagtacccgctccctatcagcaatcgagccgttcaagctgctcacgttcgctgttgcgagtgttctgtcgcttcttgctcggtttgctgacaatggtaatcggcttgctctcaaatgtgcccaccactggtctgcgctcggctgcacccgacgattctccgagagaggccatgatggtgaccatggcctgcaccgacgatttcgcttttcgcgccggtgtgtccgatatgtgcagggctttcccacatgcctttccgatgaaaggagcttctccatttgggaacccaaactcggatggctcttccaaataccgattgctggtcgtatgccaatttggccgtacgtctggcgcacgggtctcgtcggtaatcgaaatgttgaccacgggggatgactgcagcgtgttactcttcttggtccaccaggtccgaccgtgtaataccgctactggagggggacagatgaacctgacgtgtttgttcagaggagcagtcgaatcagctcacggatctgctagacggcattaaagtctactcaccgtttctcggttccataactcttctgtcccaccctgggcgaatgaatcaccaccttgcgttcaccaaaggcatacttgttggcagccgcgaggtagccctgtaccgtgaatgccgtggcgggatctatcgtcgtccccggaatcgggaacaggggacgcgattccgtcgatgtcgatgtcgacgttgatgtgatgggctgcgaaaccggctgagaatacgactgctcgtggtgattcacggtctgatccattggcggtacataatcctggtgcggcaagatgtgctgcgtgggcaaggcgtacgacatttgatccgtgctgtgtatgttgtgcgtggttgtcaagggagacctagacagttgggtgtgagtgccgaggtcagggatgggtaggttcatgtacggctgtggctggaattggctgaaatcctgtccctcgccaaagtcgcccggaaatgaggatggttgaaagtgctggggtgcatgctgatggtgatgttgctgctgctgcgggtcttgatgataggaaggcgcgtgatgattggtggacatgctgttgtccgaaaggaacagtccgttggcagaaccagaagactgccaattcgagcccggaagctctaacccgattccagacgtcgggtcgaattgatgagagcttcccatcatcattggcatcgaaccgagacctaggtcgtcgtgctccagtcccagtcctcgaaaggccccgggattcggactgaggccatccatgagcatgtcgtgcgacattgacgatcccgtatgcatcatccccgtcgtagcatcgtaaccattattatgatgctgctgataaagatgaccttcagctgactgaggcatcccaggcgagctcaacaacatcggggtccccgtagacgtcgtcgacgtcgaccgtacgactgctccgttcgcgtccagggtttccccggcgctagtaggcgagaccaggaaggcagaggtatcgaccgagggcgagacggtctccagcatccgtaaccccgaggccgtcgtcgatgggaagggagagtacgtctgatgagcataagaccagtcgagtgggtaatgttgctgttgctggtcataaggggaaggtggtgggagaagcaaggacgacgagggcgtcgatgagggagcgctcgtgttcaacgtcgaccctgatccggccaggtacatcatgtccgagcgaggcgtgctcgtgaaccccggcttggggttgttcccctggtagattcctgttgaaggtaacgacgaagacaaggtcgccgaatgacccgacgaggtcttcatctgatgatcgtgaccatagtacatcgggtctgccgacccgtgcaactcgttgacccgcgagttgggcagttgaacgctcatcgatagtgtcggggtcgaaaaggtcggttgacgtgagtagacatgtttcgactgaacagtgatgggttgatacgccgagaggtcgtcggcgagagcgtgaccgtggccggggtcaggtggaatcaggatcaccgagccaagaggaatgatatggcggtttggccgatgttgtcgacgatgtcgatatcgcgatgcgcgatacgaggacgtggttatgggacaaacaagacaccagtcgagtgtattgaaaaagaatggtccgaaaagaggttgggggggtccgtgtcgataacgtcgattggtcgtcggtcagtcaaaacgtgcggtagttgggtagagggcgttcggttgtgtcagcgatctgcgtggttcgctttgccctgatctagattgtccgaggcggaaaagccagtctcttttgacgactcacatcaaagacttgatcgccaaccgagtcgtctagctccctgttgtcctcgccgttcgggtgcgagtggtattgctgagactgcgcggtaggacctccaggacgacgactgtgttgagccatgtcgggtccggtagagcttatgctgctaatcaccgagttcggctgggcggggccacggctcgtttcaagaggcacgatggtggtagcgatcagatcatgttcacgagaggtctctcaatcgcagtagtagtaagatgagagggtctatactacactactaccaattgatgctattgatgatgatgcgatgattgataactggtcaatccggatcttttcgagactcgcaaagtggatgcctcttggtcagagcagcggcactcgaggtggacatgccatcgtcgctcgaccgagggatgagaagaagcgatcgacgacgtccccaaatgcacacacaccaacaggaaaaaaagggccgcggaacccggctttgctctgcggatgtcaagagacacacaactcgctacactcggtcagagacatcgatcagaacggcgccgtttctcgtacttttttgagtagcttggtcgtctgttcccccccccaaaccgagtggtttctagcacgtcgcgctcgctcgctgtcgggccggctctcgtatcgtggctcgccgcttcctgatcatttcgctcctggttcagggcgaaacatggtgaaaagccacatggaaacagaatgattgcgtagaattcgaccgaggtcgtccctcagactggccggctaaaaggccgcacaaggagcatacacagcagaccgaacagggtgtggatagctcggcctgggcctcggctatgagcgatacagttcattaaagaatcgcgcacctcactagctcctgccccctccttcgcggccgcctcgctgagccgggttgcgtttggggcgaaagcgctctcgggagctgatcgagccgcatcgattcttcacagctgggaccgttcgtagccgctcgggtcgctcgctcgcggccacctatcgtcccctctctctccgttttttctctcttcgcgcggcctcgaccgattgaagcccgttcatttcggacatctttgcggtaaaagctccctcccacccaaaacacgtccaaggtttccaatcccctttttccgtggcccaggaatcccaattcagatgctttgcttccgacaagctgtgtctcgcacatcccccgccctccctttccatcggcattccggaggaacaatgctgccggatgaagcccgaatgactggctatgggcggtcaagccatacgcgcatgtcatcaaacgaagcgatagcgacgagttcacaagacgcctcggctccccatgccccaagcaaaacacgaagacgggtccctgcgggatgttgatcgtcgcacgacccgccgccatcaacaccagcgtatctcccaccaccagtattccacctcgtcgctcctcccgctcccgtgcatccgctgcaactcgcgtctctgcgtggtcgccaagacccacccggcgaattggccgacgcccatgtccctggccaagatttcctcaatgtcaataccgagaccaaacggatccacctgatgacaatgatcgtgcgtgggggggtcgaccggagtgatcggcccggattcggtcccgagatgtgggaccgacactttgttgaccgaggtgggcgtgaatcgtcgaggagtggcctggcccgacgaattgctcgtagagggtacatgctgtcgagtatgggaatcgggtgtgttctgtccgctccctgaacgaccgttcgtgccgagcttgccgagtcgagccgagagcatggacaaaagagcgctcggccctgccacatcgtcttcaactagatcgtcacgcagggtttcgagacgggctcgccgctcagatcgaggagggaggacgtctgaagcggggaacgcccggacgatggactctgtctctgcagcataggtcggcctgatcgggctcaacaggtgctaatagtagttgcagagaacccatcgatcaatgaggtctctcgaggtagtggcaagcagacattcgctcaccagaacacccccttcccgtgtcacttcatccttttcgttgagctcgggcaggcgcaagcaccacttgacgacgtccctaatcatccctgcatgtcgggtatcgtatacacaatcggcagcgataatcatatcccaaggtgagtccagtgcgtctcgcatctgatccgtcaacgcagagccgaccggtgtcaccgaatcgggcaaggtccaatctccccccgatgcttccctgctggacgctctggctgaaccggaccgctcgtcgacgatccccggaaaggtgctccaatcaagaagcatggtttcgagaccaggcgcaacccctgtatccacgcctgtggcactttggtccacattgacctccctcgagctggcactggagctcaaaagcgacctggaccttgaccggcgtttcgatcgtcggcctgcattttcggcatcgtccacagtctgcacaccgtccgaaaaattgagccggatgcacttgctcaggttttccagtaccagagggtgatagtccgtagccaagacctttccccggcctcgcattcccattcgatccaggatttttcgggtgatgatggacatgacccctgtgccggctcccaattccaggatcctcggatctcgagcagactcgaccctagtcgtcgcaaagcgatcggcatctggtgcgaggtacttccaaggttctagagcgaatattcggcctaagaggatggcggagccccatgtctgtacgcccaccgacgtatggtccgaaaggggagcgtcgtagatcttcagcacgagctgagaatcatttcccgaagggtcatctcccgattcagatgtgtatgcaataggattctgtgatgaagatcgagacgagttgtctatcgggctaggtcgggttagatccagtggaaagactaggtctcgagtgattccgcctcccgctatttttgacggcgagatttttatgtcaataccgtggcagttcatgcctagacacgcccgactcgtcacacttaccggcacacccagccagactgcttatcagtgcactggcgtccatcaaaaccttttccctctcggtataagctgcccatctctgccgcgtctcctcgtccatctctgtcgtctccccgtcctccagttcaagctcgagctcgtcctcgtcttcctcgggctccacctctgctagccagccttctccccgggttatgagtccgtgcaaccatttctccgcccattctcgctcaaactcgtcaagagtcacatgactcgacgagttgttggccgcgccagagttcgaggttcgactgccgtcagaaccgaatgacctgttcgagtccacactccggctcagctccgacgtggatgttgacggtgattctcccttgacaagttgatccggactagaggcggctctactgcttgaagcagtggtatcgactccatagatggatggcacaagcgaagtacggagatgagcgatgttcgaagtgatgacttcgggcgtgagcggtgagagggtgttgagggattgacgagggagcggtgggaggaagaccgtaggtagattctgagagagtgtcatctcttatacgagctcaatcgccagggttccaaggctgcgtcgtatctccccaatggtccgagtaaatccatgagaccatgcattctatcttggctgaaatgtcaaccacgatcgtgcttgggccaggcaaaaatcagcttccgtaatcggttggcttcggaagtaaatcgaatgagccggaagcagcgtcgcaaccggtatcatcatctcatgttagtcgggtttcaggcggatcaccaaggtattcgacttgcgacctgatttcgatggcggtagagttgccgactgaaagaaaaggatgcagattctgtagacatcaaactatccacgaacatccactcgattgtatgtccacattctgcccaaagccaagaggggccgataagcgggccaggtatccgcatgacattcgtatcgtttgatgagcattatgaagctgattacccgggggaaaattaccgatctgcaagtggccgaggtacttgcctgtgactctgcgctttaatctgcctgccttctcaaactggcgttgaagggctatcggcagaacgactctagaaccagcctcgcgattccttgcatacccgatagctcctggtgcacaaagacatcggttcatatttgacgcatcactttgggttttcgggcggggtcttcgttgcgtattgccagttttgcgccttgatgtcgcccgacgcaaagcatgaaactcgatgcgccctgtggatcacatatgacggaatccctgacgtaggtcttctggcagactatctgcatcgatgtgcagtcgaatttcgttcattattggcgagatttcccccgcaatgtcgaaacaagagtcaagattactgccaaggtggcatctcgccgatcggagcgtgctagtctgggttatctccattcagcccccgttgatccactggccaactttcccttttttattcctgattcagacaaggccagcatcccgggtatcggtccttttcagatcgatccacgctctaaagatagctttcgcatgcgctctttaatgcattggagatctcctcgaggatcggggcgttcatattctgacagttcagtacagtgtgctgaagccgggcatagaccttgcccatgatctgagaaagcctcgagcaaatttctgtcctactgaaatcgatagcaggtttgtctatcgcttacgggtcagagacgctgtaaaaataatggctggtacaggcgcgactgctgtagatgaacggcaaagactggaggagccggagacagcccatcctgtcggtccgtgccatggaataagcgccgctgattctcggccactctacggactgcggtgccatcttcgaaatattttccatagagccaagactttattatcttcggaatcgcctgacggaatctgacttcactaggggactgaatctaatctactgctaatattgtagagaccaaaaatggctaaaggctagatgaagcttccgccttgacccagatagctcggaggacttgcagcaccacctccgtccaagcgccccgtcgttgccactagtacaaagtcactactgaactccgatggcactgatcttgacctggtcttttcgaagtagttattgatcgagcactagaaaatgagcagactggaaactttactacggatctaggatgttcagggtcctgagtgattggtcgagtggagttccatgaggtcctacttggcgccacttcggcccggcccgactgccgtggtcccggttgagcatattcgcgcgaatggcggaagaaagccaggttctcggaaattccaaaattcatggtgacaacgacgtgctcctcaaacacttttcttgcgaccttgttgttccacggcctgactaaccagcgacattcccacaagttgtctctacggatacgaaaaaagctcaaacttcacatagcgcgactcactcgatatggtcgatcttacccctgctagcaagtcggcacccaccattccacccaagatgatgtcctccctcaaagtgacggatgacagcgtcctggtcatcaaccaattgctcttgccgtaagttgacagggtgtacgcaattcgtcgctttggccgttcgagctgatttatcatcgctcgctggacctagtcatgtaattcagtgggatcccgtccatacggtcgaggatgcctttgacagcatcaagcagatgagggtgggtagagacgggtgacgtacctcaaccacaccggcttaccaacccggcgatgtagatccgtggagctcctgctatcgcttccctcgcagctctcaccgtctcgctcgtcctcacccgtcgtctcctcaaccctctggacgcttccaccgaccctgccactagctcggcccacgcttcggcttaccatgtcccgggactcgactccccagagaccctgaagaactggctgttgcccgttctcgactgcctcgagtcttctcgtccgaccgctgtcaacctgcaagaaggtatggacaggatccgaaagaccgtgaaatcgtctaccaactcgaccggcgtttcaactgaggacgccgccaaggccttggcggaggaggtcgtcaagacctgtcaggcgatcgaaaaggaggacctggagaggtgcaaggagatgagtaggatcggggccgagtggctggtagaaaagatcaagagggagaagggcaaggacaagttgaaggtcatgacggtgtgtaacactggaagcctggcgacttcggtacgttcggccttcctcccttgacgattgtagtggcttatcttgatcgatggtcgtattgcaccttatagggatacgggactgccttgggcgtcatcactgctttgcacgagactggtcatctcgaccgagcctactacactcaatccaccccttaccaccaaggctccaggttgacctcgctcgagctgtctacactgcagatccctagctgtatgatctgtgataccatggtcggatcgttattccagcacgaggatgtcgacgctgtcatcgttggggctgataggattgtcaagaacggcgacactgccaacaaggtgtgtcacagccaaacgaccgatgcagcacgagaatcggtctgacctcgaaaatcctctctctgcaattcgcagatcggaacgtatcaggctgcttccctcgctaagatgcacggaatcgactttatggtcattgcgcccgtcacgacgctcgatctgaccaaggcgaccggcaaagagtaggtcctgctcgcgtgcggtccggatgtcccttgactgatcgcaatatcgcctggcatcgaacagaatccacatcgagcaacgccctgctatcgaagctacccaagctcgaggtctggaccccctgaccggcgctcaggtcattgttcaaatcaccccggacggaatcggttctggatcagaggaatggcaaaaggtctacaacccgagctttgacgtcacgccgagcaagctcatcagctgcgtcgtcactgagaagggtgtcgccgtcaacaagggtggtgagcaaggaatcgacttgagcggagtgtgctaaagggggatagccgagcgagtgaacgagatcctatagatgagcatgtcgggaaagcgtacatgtaattccaccggcgctatgatatcggtcattatataaatacacacgatcaggctgttcgtaaggttgatacaacacgaattcgacgaggccgatttcgataggagacgcagactcgacccggactctataatttcatatggaaaagcggtctcattgcggtcccgttggacgacatgcctgtcgtgctcctgcctgaatcgcgatcgctatcgttacccgccatagaagccatggacggtagtttgcgcagagaagccggcatcgctttgctttgactggacaaggttggcattgctgctcggagggtgaagggtgcgactgtaggagaattagaagtcgccgaaatttgagtggcagatcgtcccaaaggcggcgctcctagctgggatgggataggaggtttgatggacaaccgtcgcgaagctttacgaggcgagctctttttgctcggcgagaggagtccgctaaagatcatcttgctgtgactcgcaccgattgtcgtatcgccgtcctcaaacacgggcaacagcgatgtgcgactcctcttcttttccgtcctcatcggtccggctgacgagaggcgccgcgatggcgggcccatagatgatcccgggtaattcagaccagttccagccgtgcgcgctgcgctggttgcagtcggacgggtcaaggtggacatggaatcgtttccggcggcaaagctgaacggcttgggcttggtcggcccagagccaacgaccgaggtcctcctcgaacttggcgcaggcctcaaattggcagcggacgacgcctgtaatggctcggccgggcgaagtggtgcgagggatgcgcgaccgggacgtacaggtccaccgagtgcagtcaggcgagcgtttttgggggccaacttgggttcaggagacgagtcaaagctgctgtcttccgagacggcgagcagctggtggagtccagccccatttacaagtctgctcctcttccattcgggaatagctggcgttcctttgaagacgatgggcttgacggcggtatccgacttgtgatccaagctggggaccgaagcatctccgaccacgtgatcatcgctgtcatcgacccatgccgtctcctcggcctctaccgtgggagtcggtgtggcgggcggcgtatcatcttcgctcgaccctagcgcttgcatgcctgaatcctgtcggacgtcgccgatactaccgtcaccagcctcgtcacgccaggtcacctttttcttctcggcacccaggccttctttacccttgggcttcatgaacgaagtggtcggaggcttggaacgcttgcgaggtgagaagaatgcgcggatcggcgatgatcccatgcgagcggctgatggtcccatgatacggcgcatggaaggcgaaggtttaacggccgagccagggatgggcgcgagcgacatgcgcttcgatggccgggacggttgtgggaaattcgcgacgggaagaccggcggtggaaagggagggcgggaggaagattttctctcgatacgcaggcgaggtctgtctcgccggactcgacattggtaaagttttcctgcccaacaggctcgacgtgatggcgtcggcctcgcgggcaaactgatcgagcagttcggcgaccgctggggattcctggacgtcgagcgcgccactcttcatcctcgtcgagtgacgcacaaaggcgccaaacaggacggccatggcctcggcctgcatcttgatgctcgctcgataggccttttctctctcttccaactgggccttgctgctttcggccttttgcaacgaggcttcgaggcgaatgttgacgacgtcggattcctccaacttgtcaaactttttctcctgcatgctgcgcaagagcatgtccataaagctcgattgcgtcgacgcgtctcgcaactttgcctggacctcgttgttctttccataggtctgttcttcccgttgaatcaggctttcgagttgcgacttttcggccagctcgcccgggcctgcgtctcgccccatcctctcgatctcggcgactctgttcttgaggacctcgatcctcagttcggcggcgtcccacatcgctcggcatgacgctccggcgatcatgggcgggaggtaagacgccgtcttgctcttcatctcgctcatgacccgttcggcttccctcctcgcctgttcggccttgcgctgttcggcggccgatcggtcgtttgtcttttcgttcagttgcgcttgtagcatggcgatggtcgtgttcttttcttcgatcgccttgagatactgggtgatgttcctctcgaccccgttgacgtttctcgagaccttggtgacgatattcttggcgcgattggcgtacttgagggtatttcccgtatcctcgaggtggaccgagcacggcgagacgcagacgatcatgaccgttcgacagttgccaccgagcgaaaacttgagcagcctggtgagtttactatctcggtaagggatatgttgaccgcctccacttctcgatgggggcatgcagagcgcgttgatgcagttccctagggcgaggagagacttgttgatattagcgccttccttcatcctgttgcccatattttgtgtggcgctcgcccgttcgcttcccgcgaggtcaatgatggacaaggtggccgagctgatcgccgtcgtcacggtccccgcggcgacatcgacctcgtcgcctcccttgggccgcctactgatattcacctggaggacggcatgggatcgagaactctcggcgttggcgtgcgtcggggaacacgtccgtctcgagtttcccaagaggacgtgttcgagcacctcgtctgccgttttgggcaccttttgcgccagaccggcgacggtgatccggttcttttcgtcctctcgcaagctcaacccgcctcgtgggcaggaggggtaatcgtccgagagcaagtcgcggatcagttcgttgtagatttcgagaaacgagacggtgacgtgggtgtcccattgttccttgctctcgtcgatctggttgaagagctcttgcatcgtgcggtagatgatccccgggtcctccttggtcccgctgacggtgtgcgtctttccacatccggtagcctgcccgggcaaagacgtcgtcaactactgcactgcaccgcactccctcggggtcccactcactccataagcaaagacggtcgcgttgaacccatcgaacaagccgggtagcagaggtttggccgtatcgttgaaaacctcgtcctgcgtcgtatccttggcgaacacgcggtcgaaagcgtacctgccggcgtcgtccatgatgggatcagccgctcgacccgacaagagaccagggtgggggtcgatccgacgtacctctgatcacggtagcgtttagcacctggaggttgtttacctcccgacaagaaagagcgtgtggggtttgggtctggtttatcaaagatcaacgttctatgatccacgacgtctatcgaggcgggtccgatcgcgtcgagtcgggtcggagtgagatggtcacaggaacgaggtgagataaacccggattcagtatccatcgtcaccacggtgtggcgggcgggcggaggactcaccgacgacctctctccacatccctcctacattcccatacatcccacccgcacccgtacccgccccgaccacgggggaccctctagacggggtaccattgccgttaccattggtgttggtattgctggcgagatgcccatcgcccatgaaaaaggcatccccggtctcttctgggatccgggcggcttcggatgtggtcaggggtctgacgcggactgccgaagaacagaagaaaagaaaaacaggagaagaggaggagaaggagaagaagaaaagaggagaggattacggatgagcgattcaggtttcgtcatcatagccgtacgaactggattgatggactcacctgcgacttggatggcattggaatcgatcatctcgatctcggtcttggaaagaccagcgatgtaccctttccccctcccactttaaggattcaaggacaaggaaacaggacacctggctcacgatcgtgcgtaacgatggtcgtatagaagtgagaatgggcggggtttgagagattggaccttaaaggaccattattcttatcgtcgattttgacgggatgggtctctacgctctacgtcggtcctctgcgtgaaatacggcactttactatctcgaccaggtttgttagtcgaggttcttgctgtccaggtgtcgaattcgtccagatggtctaatttgatgatgccagagagtcggtatggattgcgatgactactgtgacgactgaagtttgatgattcgagggtgcaggtaggtgattgtgtatgtgtcggttggtttgtttacaaaatcaaagtcgaatcgaatgggagatttggttgaaacaacatctacgcaggcgaccagggctgccctacggcacactcgctcgcggcataattacggcaacccccaccagtcatcgacatgatacagttgatccgcggtgcaaaccccgcttccctggccctgtcactgtctcacacctcatcacctacctaccccctctccccacccgacatccaaatcctcaccccctctggccgattcgagacgcaaaagaacatttgcatcgacgggatcacttcgttccatacgggatcgtggagacccgtctgggggataaggaccgtcgtcgtcggtctaggcgggttctggaacgccgttggaccggaagctgaaggtgggtatggggggttgaaagtagatccgggagagaggagacggttggcaggggtgtaagtcggcgtcggggggtttcggtctcgctcactcgttgacgcttctggttcgatcgtcttgtcgtctcaacgtttcatataccgatcgcgctcgaacaggtcgggtgattatgtctgtgcgacctgtagcaagtccaacaaggaaatcatgcgggaacatgaagaggctctcaagaacaagaaggagcaacaggatgcggtcgttgacaccgctgcccgtgtcgatggacatgaagcggaagaggcaaaggagaatacgcaagacgaggtcgatgtcaaccgcgatagccaatttggagaggatgacattggcaagaagacgccggtggatccgacactgaccgaagtcgagtcgtcccaggaggaaaagcgagaaacgatcacggtgacctcgcctgaatccgcccccgtcgctgtcgccgtcgacgccacggaacaacatcccgcgctcactcccctccatcaagcccttctccacccttacctctctcaccctctcttaccctcgcctctcaagctctacctacacatcctccggatcttgttcgtccccgcttcgacactccgcgctcatcatcacccggataaactcgacgggcttttaatcctggacaccctcatctgggtcgtcggtaccgtcgtcgtcctcgtcctcggtctcaagctagggaaacacctgggagtggccggtcgaacgctcggttcgatgttcaaaggacggacgggcgcggtgacaggtggggcagggacgttggaagcggtcaaacgactccgacgcgctccgaatgccgctcgacagcccggtagggcgggacacgttcatcctcgtcggaatgggatcaggacgggggccaatgcgggtccgacgcaagagccggggttgataggtcgacctgcgggtgcgggtgcgggtgtgggcgggcaagagggcagaccggcggctgggttggaacaaggggctagggtggaaagacgcgcggccagggcggtcgcagaggaaggtactcttggggcctgataccgacccattccccgtagaaactgtccacgttgtaatttcgatcgcattgttcggcatgtgttgtgctcctagatgtatcatgtcgtgcaggcaggcagtctcttgcgatacaacgcactgactttgccttgatcgagcgaattcaggtttgctagttgcttgtcgtatttctttgcggttcctttctagtcgatagctagcggtttcagctcgtgatgcctgccgactcgaaagacatttacctgtgaattcctccaagaatcgacatggcctcatgccctcgaatcgacttgaataacaatcgattccattttcaccccggcgccgactcccgaagcatcccggcagcttgtcggaatgagcagctatagtgtgccactaactgctggtgaatgcgtccaacctgatggaacggtcttctttcctagatcgtggcgtttggcgtggtcgattgagagagatttcttcggatttgaccgacgcgatcgccagaaacatgatcatcgagatgagaagacagctatgctcgatacagctataccttgacaacctaacttgtctccacggatcacctgtcggtccgactatagacatcgcttgacaagcagcgcatcttaatccacgatactcacctctcgaccgcaccccgctcgcctgctccacctctcctcctcaagcttcacataccgagccatgtccgccagctcgagctcgacgcgacccgcacctggatatcgcaggaaaccgttgacgatcggatgcgtacaattcgatccaaaggcgagtccaggctgattgagctccagctggattttcgtctagacgtagctgatatcgtgcttccggtgctgggatgtagtttggggacgtcaaagggaacgcaaggcggatacgagagttgaccagtcggtcagtccggcgtctacattcccgaaacaccccctttcgactcacatcccggatctacctcgctgacattgttcatccgactcgcctcgacaccctagcatccaaccgaacaagatcgacctcctcgtcctccccgaaatgtgcctgacggggtacatgtacgaatcctcgaccgagatcgccagcgtgctcgaagacccgaggacgggaccgacggccacgttgagtagcgagttggcgagaagatgcgcctgttgggtcgtcgccgggttcccagaaaagtctagggtggttcgaccggatgatggggacggtgaggatgtgggtgatgaagagggatcaggatcgggatcgggcgacgtcggggtggaagaggaaggacgggcaggtgatcgagtcgagcgggaagacgagtttatcgcgtacaattcggccgtcatcgtctgccctcaagggacggtgtacgatacgtaccgcaagagtttcctctttgataccgacaagacgtgggccaaggaaggtgagtctgcaccgtagctggatcgggatctgccggaagggttgacgttgagactcgacgggatcgacatcggtcttgtgcaggcgacgggttcaaggtgctcgacctacctgaacctcttggacggacggtcattgggatttgcatgggtgggtctctgccggacaacaatatcggtggcctcgctctaagacccggcgagctgaaatccatctccctgtctcacgaatcgatgcgcaccgatgcgcaccagatatgaacccgaaagactttcaatctccatttgatgcatacgaattagggcatttcgttgcaaagacgaaggcagacttgttgatcgttccgtgagtatgcgccgtggtcgatccctgacgacgatgatcacgaacaaaaatgtccgttcgatcctgactcgacacacactcggcccgtgtgttgaacaggatgaactggctcgaacctcccgccgaaccccctttggacgcatacccaacgtcctcgtcatcatcaacatcatcatcaacatcgcccacgcaggatggaccggagatgtctaccctaaactattgggcgcatcggttgatgcccctgcatgaccctactccgggttataccccggacggcaccaaggacgtgcagccgggcaaggatgtcgtctttgtcgcatgtaaccgggtcgggaccgagagaggcaagtctgccggtttctctcacttcactttccccgaatcgatcgtcgtgaaccgcatgctgatcaagggaaggtatctcatctcgtctcgcacggcccgggcgcaacaggtactacctttgtagggacttcgtgcgtgatgagcatctcgtcctcgcccagcgggatcgacctgatcgaggcgatgggcagcaaagaggagggtgtcatgttcgccctgatcaactgagagatgcgcgtgcgagtcgggtcgcggcgcggcgcgacggtttgaatcgattgatcggtcgatggatatcgttttgtggtcaccagtcggttacatgactagtcgcaagtcatgatccaccacaattgagccaatgacctatagtttgtgttcgatgtcatgaccagcacatggaagtctgtccgtacctctagtcgtatcaagatgttcaacgaccgacatttcatgcatctcgtcatgtttgccagaagaaacattcttcacttcagtttggccaccttgagaggtaaacctctccgactctgtagaaggagccaaagtcgttcaggatacacttgatatattcgctagttttgattcaactggtctcgtttgattgtttgtatgtatgtgaggctgacatgctgcaggtagtcgtcgtggttgagagtggctggctggctggtagctgtttacgtaaaattgataaatgtcaggctcatcacccccctgcttcgcatcctacacacactccctgtgatcccacccccactcaccctcagccccggctccctcctcgagtgggaatgacgatgacatagattgagtagagtagagtagatcagactaggtacaccttgtctacaaccaaccctccctctcgcactcgatcactcctcgcactcgactcgaaagatagcagacgttgcttgttcgaatcctttccctacagatcagcaatcttatagtagcctagaatagcaaaaatgggtggtgaaggtcagtctgacgccaaaagggaactgcacacgaccccgctcaaggctcggttcccgtcatggttttcggcatcaactgatgatcattacgtcctatcccgctcctctatctctctctcgctctgggtgattgtccaccattaaacctggtgcccgaaccgaacatcaacatgtcgtcctaacgatcccctcgatgatgacgtcctccctggaccgaccggaccgtcaacagcctggttgttcctctttgccgtcttcatggcggcggccctcttgttctccatggtctttttcgtacgtccacacctctcaagctcgaactcccaccgagccccctcgaggacgtcttgtcgctgacagttcgcgcgggttctcgtcacagatcatcatgttctcggacttggagtgcgattacatcaaccctatcgacctgtgtaacaagctcaacaccgtcagtcacccacccactcccctctgtccgcgtcttctataaatttgttgtcgggacacacctttcgcatatactgacccagacgacccggcttcttttcgtcttcttgcgacctcgaacagttcgtcctccccgagatgctcgcccacgctttcctcaccctctgcttcttgttgaccggacaatggatatcgttcctcgtcaacgctcctttggtcgggtacaacgtcaacaagtacgtcccctcgtcctgcgccgctttcgggagggaggaagacgaccccctcgctgaccctcttccccttccccgaccggtcttttcacaggatcttgaccaagaaccacatgtacgacgccaccgagatcttccgtaccctgtcgggccacaagaaggagtgtttcatcaagctcggactgtacttggtctctttcttctattacctgtacaggatgatcttggccttgatctctggtgagcctcgtgatccctacattgagcccccgccccctcctgctcgtcacttctcgccatcccgtcgatccggtttgtcgtacacggggggcgttgactgatcgatctgtactcccgcatatgtgtctctcggtcgaattctcgtatcccgttctagaataaggaatgagaagctcaggatgggtacgttaagcccggcggttggacgacggacgtgtatcgcgtcgggatgggtcgcgctctggccgtcctcggcggggaaacacggagacggcagaacagtcgagaaagggggatgaaaaggatgatctgggaacgcgatcgcggggaaacccggacggacgggtaataggcaggaggatgggcagtcgacaccggggaggaggatggtcggtctggagatcgggctggaaaggtcggggggacaggattttcgtcgtgagattacatatagaatgttatggctccttatgatatatatgcacaggcgggtgcctcccacgctctcggtgttttcggtccggtcacagcacagagtatctaggttgcttttcgctgtacatgaagctcgacagggcgaggctctcaaaaagagaatagagcgtcgttcttgacaaggcttgcacggccatatttgacctgactggtggcaatcgaaggagatgatgagcggctattgagcacagcattcttcgatcgggatctgggccgggagcgtctcctgaaaagttaagggtctttatgatataattcaccttcgacatcgtcgacgctcgacgtatcggcgtatcgggatcgccaaataacgccctcgggactatcaccgcgtcaagcgattcctgtgtaagcctaaagctacaggacatgtagagactctacaagacgtcaggaaaccaacattccgctcgaaactgtcgggtcggttagggcgacccaggtctcgagaggatcaggttgatcgaaagtgcccgttgcggagagtgtgaaattacgatgttctctgtcgtcatgagccagctcttctggtacagcaaagagctcgaaccaaggctggtatgctcaggcgccatggggtcgaaacgatcggaaggcaagggatttttccctacaccatcagaaaagacgcatgtacttccaggtcgcctgcaactaagcgcttctaaggaatgcccaggagtagactgcatactattagatactggttccgtgcatctgcaagctttagctgctattcctcgccagtcgttgtcgccgaacggttgtttggatacgacttgacttggccccggtcgctcgctgcagcgagacacgactcggcaactgtttcgatcacacaaaagtccagacctatgatcggaacgtcctttgaacatgtcgcaacgtccgtgtgtggcccgtttccccttgctgcgactggatgcagctggatcaactgcccgtttgcgcctgcgcgaggcgaggtggcttgaaacgagcgcgaacaacgacccagaaaaaggggatatcatgacaagttgcgcagtcagtcggatcgttctcgtatgaccgagatacgccgattcccatttcttgcctggcaggattaatcagtccacaagcacacgcaagtggaccttacacattgaaaggggtgccgaacgctggccaatcattggccaaacgaccttctcggctaggtggatccgcagaaatgacgatattttgatagagttgatgatgatgtcatattcaaatcggtcgacgtcgacatcaacacatgttgaacgggaaccgttccaaaaaggacaacccatctcctgttcctccaaatgttcgtaaaaggtccttgataaagactgcctcggcctaacaacgaaccatgtctcgacttcacgaccacccatggagtatcaattggcgtaaagcgctagtctcggcacccaggctcgttcccgacctggcgttgaagtacaccaacccggaaggaccccaaccgatcacggtcaaggttccctgcaggacttcgaaccggaccatccccgtctcggtattcatccctccgtcatcatcggtcaaggctggaacgacgcacgtccctgtcgtcctcgaccaccacggaggtagcatgatcttggggacgacggcggagcaggcacctttttgtgcaaagctgtcccgagatctcggatgcatcgtcgtcagcgtcgactacgctctgggaccttacgagcagttcccaagggccaactatgattgcgaggatatcgtgtacgccgtgctggacccgcaacgacccgggtacagggaacttcggaaggggatcgtggatcacctcgccaaacacaaacgggcggcattggacattgattccactcacgtcgccatctcggggttctcgtccggtggaaacctcgccctcgaactggtactcgatatcaaaccccctaccctgcctgaagcttggcccagcccgttccctgccacgcaccccagcacgatccccgtcctcctctactacccctcgttggacgcaaggttgttgcccaacgaacgtccttacccagaaggcatggaacccaaagtccaaaagggggtcgtcaagaagctcgacctcgagacacaactcatgccgacctacttgccgagggaccaagcggcccatccacgagcatcccccggactcgttcccatctcggccttgcacccgaaagcggagatcctgctctacctgtgtcaactggacaccctgtcgactcagtcgctcgcctggatagaggccgtcaaggagggcaagcgggatgccgcgttgaaggtcgtcactgccatcggcgtgccgcacgggttcaacgtctttcccgacgcctggttgaaggaggagcatcgcaagctgaaaaaggagtcataccagcttgccgtggactttatcagagaaaagtggcagatgggggcaaacaagtagagctagctaggctggcataaaggcataaacccctccgttgtatcaatcgcatggctgcaaccttgtatcacgaattgtccggatgtaatcgctttcagaccttgatatttgggacgatttgattgtgcgggactcgcgaccacgaagaaggcccgcagaaccgacaagagggtatggaaagtacaaggcgatctttacagcagagaagaagacattggattcgaacatgaaggagaactagcgtccattaaaatgaggggcatcgtaaagagagaacaagagatcacttcgagacctcacttgcaacgtcggacgctgctgcagtggctgaagctttcctggcatgagctcgagcagaggcgtggcggtgtcgagctgcaaggagttcagcccagagcgggttcgaagggactttgccgacaaggctagtcaagactttcatcctgtatcgctcacaaagctataagcgaataaccggttgtctcgtttctggtccgaaacttaccatccagccttctcgtcatcgttatcggtccaaaagagaatgtcttccccatcatcgaaaagaagccggaatgaccgcggcatgacaccaagatcgccatcaaagtcctgcgtgcgccgtgaaggtgtcgagggagccgggcgtgccagagcattctcatcgttcacagagacgaccttgcgaaggtcgatcgagaacactgtcttcttggtaaccgggtttctcgcgaccaggttgccaccgacaaccttgaactcgcgccgccttggaacctgtgaaacacgctgttatcagaacggaaacatgccctgattgatattcagactcacgttcgagtcccctcccttctgagtcagtactccctcgtgatactcgtgttcatgccaagcgtggtgtctcatccccctcaggcactcgtcgatgctctgaggaagctgctcctgatccagaccgggcaagggtggcagacggaagatttgcagagtaatcttgcatacctgcttcttgatcgccgatgcggtgggaccggaacttccggatggcggctgcgaagccggtcgatcgcctttgctgacgggaattggtggcaaggcactttcttgacgcagagcgccaaacataggatatcggatttccaacagtctcgagtcgcaattcttggcaataggcttgaaggcgatgtgagtcttgccgacgacggcttcgcctggtggaaagtagtgcccaatattggtctcctgggatacaggtcgaggaatctccgtcatgatggccttgggcggttttgaaccctttctggggcttccaaagaggtttcggaatccgctactccgagcgcccgacgcaaatgaagcgacctcgggatcaatgatcttgttcggaaccgccggtctcgggacattgttgtgcaacatctttatgatgtggggatcccgtttgatttccagacccaaagtgaattcgaagttggcatgttcaacgctgcaggatccgtgtcagcatttgctctcgagtagtcagcgctaggtgcatgtcctcacagtgcgaattcctgattgacacgcgcgccttccttcaaggacgagtaaggtgttctgatatagtcaataccgttgtcaagagtgacgcagaaagacgtctcctctcggggcagcggcagcgccaaggattcgatgccaagaactagcagtaaccaaaagatgcgcatgagcatttgcggttgtgaaaatcttgcgaactgaaaaactgaccctttacaaagatggttcccataggtttgttctggccttgcgctttcgctttgagcgctttcatctccttggcatattggttctgagataggtatcaagtggtcaacgtcatgtcagcgggatttctcggcgtgcaaactcaccatatccgaggctttacgcagttgcttccaagctcgaccactgtcaacatccccagctttgttgtgcttgattttgtcgtccgagctagcgtagattgtttggtgctgctctcgcactcgatattggcgctagaacagtctctttgttaacgacaatcttcatgcgagtcgatagctgccgcggtacatacatcggcagtgatatgcttcacatcctgttcgaaagcagccaacatggactgattgtccctgaagtccaggtcgtccaaggtgctcaagatcgacattcgagcgctcgaattctgtgaaacatcgatcagcatggcggggatggatgacgggcaatgatcgatctgggcttacccggtctgactttggccgggcatctccggtactcatgcttcttctgcgccttggtcgagcagactcgtcgacgatagctggtgccaatacgacgctgtcgtcagccgacatgtctagagaactcatctccgagataggttgcaaggtagaagacgatgcagtagggaggcctgatctagccggtcctgttgtcaagacgctttcggaggagacgtggcgtacaaccaaagattgaggccgctgactttggctaccggaaggcagaccgttgaaatcgaaaaccagctggtccaacgcgctcttcggttcttctggcatcccatccttatctgcctgggcgagaatgtcctgcgctgaacgtgtttgcgttcgggctcgcagttgaggtctcgcaaggggcgcttcggacgacggcggcagcggcaaggccttttcaagaagcaccgaggcgcgcttagcgatattgggaggcaaatcgtcttccgagtccgagccgctttcggacaaagaagtctgtgttgccttgcgttcttccatccttgcgcgaatcatgtctttcgaaatccgttgcctgacttgcccgttgagactaccgctagctgggtctgtcgactgcttgctgagcgcgctatccgatcggctgccattgaccgattgatcgagaccgaactggctggatcgcttcacgatgcggagaggatctagggataactttggctgaagaggcggcaagggaccaaagtcttcgactgtcgccatgccggaatccatttcagtgtccatttcgaaactcttgccaagatcggtttcaaagtcaaagtcgggaatcctgtggggactttccgccttgtcgaccttgacgaatgctggaggtggggtcaaaggtcgtacggtggcctcggacatggcttcgctttcagtcgatcgacgttcacctcgtggctgtccggaggggaacagcgggctgttcattccgatactaggaagagagaatggtaatgaaacgccaaagacctgtaacacgaccagaacggagatcagcttgctgcagctccagtcatacgtcaagagtcaggacatactgaagggctcgtgcttctgggcaaatcttccggcagagtgaccggtgccagtttgggactagggatatccaggggtcgaggttgagggggtttgggcagcgtcctcttgttggccgaagacgacattgttggactgcacagctgttcgagcttttgagataggggtggcctcctctcagaggtctcttccatcttgggcggggtggccaatgtaggctgaggctgcgcaatgacagctggaggccgttgcaagacttgttccagatctccgctctcgctctcgtcactgaaatcacttccatcttcgctctcgccgtacgaaatgtagcgcgtctgcggtcggccggtaccgggcagactaggttgtttcggatggttgggcagtcctagcccaaggttctgggtggcgagcagccgagctaccttggcacgctcagcatgactggtccgacccaatggcactccgccttcttctcggttggctgaagcgtactcgggcgaggcttgattgtagactttcgtggcggtctgaatggtaacgaaaggatccacgaatgctccatcctgatgcgcacgaggtcgatcttcctggtaatctgaataccggctcgatacggggagagcgggctcggtgacgtttgcactcctcaaaacgggctccccgccgtatacagacggtttgggcaaggtcggctgggcggtcgattcgttcggtcggataggaatagcgtgagcaagcgcgacacgttcggcatgatggctgccaccgtacgggacgccagcgttatccttgtcgtcgcgagtcccagcggatttctcaaccgaaactatctcgggtccgagtacgggcggctgttcggtcgtaggcgtatgaaagcccaaagaactcccgaacgatggcgtctccagcttgggcgtaaagtccatgaaatcgttcaagacgggcgtctcccccggtatcgaaggcgtatcgctcaaatgctgcgggagttgaggaagttgcaccgaaggcggagaaaagtacccgtcctcgacgagcgaatcaataaagtttgccgtcatactttcgtccctgtaagccccctcggacgcatggctatccgtgctcctcgccccgtgtccatcgttgctctcgtattcctcttgcgcgggactggtaccgtgttcatccccgtacccttgatcgttcagctcgacgatcccgctcccgccaccccgcccatctgcccggaaatggtgcatcgcgtggtaagggttgaagtcgccttgatctccgaggtcgacgtcatccatatcgacgtcggaatcccgactatccctgctcttgtccccatcctcggtcacgctctcggtctcgaactctttcacatccggaacagactggaaggtgaccgtcttggcctgtttcgtcgcggtaggggattccgaaccagagagtcgaggtccgtgaagtcgacgcttggtaatactggatttcgtcggggtggcggtgtatgaaggttcatgatgaataggagggagaggtttctccgcacgcaacgaggagatggatccttcttgcgacgatgggaatgggacgaggttctctgctgaaccttgcgaaggacgtctcttgcttggactgtcactcgtgagccctgctccgaccctgtccttatagatgggactgatccggcggttcgatccaccctgcgtctgaatcgggggcgaggagaacacgtcctcctgcgtcggctgacgaggagaatcgtatctagccggtgtccctcctactcgggcgggagatccagtcatccccgccggattcctcttcaacggtgtgctctcttcgtcgggatccccacccatcgtcccgctctgctgtaagaacggcgaccgggtgaccagaccccccttggcgagtcccttcaaccccatcgattgtctaggcttgcgactcccgctcgccctcacgtctggggagtactgacctagttcatcgtactcggccacctcgttgttcatgggatcatcgatcgatcgcaacgccccgcccgaagcccgacgttcttccccgctgacccgtcttcgctcgctcggcggcgtcttgacccgttcactagagaccctccgagcagagccagatccagaggatgagcgggatttcgatccagatggtttcctgccggaggatcgacgtggggaggaagcactgataccaagtccgatcccagaaaggaggttgctcgatttcctcggggtagtcacgttcgatgcggaagtagaagacgtcgtccctgtcgatttggaccggacgtgcagggtggacgaggtcgtcgtcgtcgacgagctgaacatgctggaacggccattcgtcgtcgtaccacccgatttgaagggggattttgagaccaaggcgttacccgtcacatgcttgaagctcgagctggtccgtctcggcccaccgtgcatgacccctgccatgtcgtcgtgtgccggagattgattaacgggaggatgagtcggtgaagtagcactcgaggcggtgcgtgtagatggtcgtttggtctgtaaaggcgaccagcctttggaggaattggcgatgatgctatctcgagtggggtcgaatttcctaggtgtgagaccggagtgggatggaggactatgtatccccgcggagtgaccgccggcagtattgttgttgttgttgttgttgttgttgttgctgatggcatgcatggtcgtgttcatgtttgatcgagtgggcgttgctgatcttcttgatatctcttgcccgagttcgatgggaggtgccgtggccatgatggaggattctacaaacccaatggattgcctggtgatggtaacggcgacgggcagttcgatcgatacgaggtcatgttacggttgttgatcgtttgtcgaatggcgatatggtgatgtgatgaggatgatcgagacaaaaaagagaaacccgatcaatatcgccggagaaaaaacgtagaacctgactcaaccatcggtcagacgctcaccagacctcttgtagctgactgtccagctcgatgccttgtccttccatagatctaccgggtgccacttgatcggctcttgttgcttgtgctgtcctaatctagtttgtgggtatcgccatgtctatcgtcgtaaccatcatcatcgaaatcaacgtcgtctctgatctggctgtgtctctgtctttggctcgctgatcaccgccgctgccatcaaacaacaacaacaacaacaacacactgagcgagcgagcgagaccccagatttccatggcatcgtcatcagccccccgctagtttgtttacatcgacatggctattgacaagcgcatgaacgcgcgcttctagttgacgcgctcggtagaacggctgatctcgcgtttcaggttgcagtcgcgaaaatgcccaatatctggccaatgcagtgtcgaggagacgccttgtaccgtatcagactacctttcgatggccaggccagacctgttggccatccccattctgatctctggcagttggccacatgcggcaaggaatggattgagcgcgcgttttccttacagaggggtcccatttagccaaggccgtgacgaggtttctgggtctttacaatcacgacattcagcatcatcactgccaactcgacaggctacaccgtttctgaacacctgatcaatgctttacatgcgactatatgaatagaatacgcagccacagtcatttgaccatcgataatgaagtgctcccagcattcgtgaaagcataacatctgaacgctcaccctcagcagaagagagagacggtttattttatcgggtatccccgcttcggactgatatgtcgttatatgtcgcaagctagaatcaaaggagagcgcagaaggctgaaagatcgcgccaggcggtcaggtgagacggccggtggagtagcgttcttgatttgtatataagaggacaggtgactgacgatcagggtatggcccttcttgcgcggtacctctgtctcccttggaacacatacacaagtgaacgcgtcgccgcaacaaaaagaaacgtcttaaaagaatgtactgcttgtttccttgctgttgtgtgaaggatgaccaaacggatcagccgagccctttcgggggagcaatccttgtccgagtctgccacggcgatcatgggcaacttccaccaaggggggcccaaggaactgaactgaggaatctccggaataacaattcacaagaaagacaacagagcgcggccgccgcgtcctcagcgtcgaaccagaatcagccgaatgcagagcttgtttacccggctgatcaagaaggtatcacaaagctgcagcagcctcggaagaggcttgaaaaggagtggccaaagcagagcaatggtggcgacgtagccatgacctttgagcagtataacaaattcctcgaagacaaaacctacactgaagaacccgaaacaacagagggggacagaatgagctcattttctgcacaagaacttactacgggagtgggagggcaaagtagcgcaattggcagcattccaagcaacagtatcgcgcgaagcggaacattctaagtactataagtgcgttggcaaggactactagtcaagttcaattcacgtcgcgatgcttggctctgaaaatctttcgaacccctgtctcatattatgcaatgatttgaaatgtgcgctgcggcatgggttcttggtgcttcgcgatgacagtgatgcgaaattcacgtataacatctcgctggcagagaagccagaggctagatgacagacagcgctgaccgcatctgatttccggtccgaaaaatcgttgtgactccaatccgcgtaactctctgtcatcacgacgtctccgttatacttgctttttttcccatttaagacactatcacgcagtgtataccctcgggcggccgcatcgtgtcacgcatggagctagtgaatcgatcatccagatgcgatgttacctctgctggccttcagccgagggacaatgtccgcgtcgcgtgtcgtgtcattcacggaatggcgataccaagcagttattacttcacaaccagggcacatggacagaagcagtgcgggagggccgttattcccgttttcggccagtctttgtagaaatgacgcaagagcgaatcaaaggagactgaccaatgactgaaccccaacgtgattcaggagattggccatcacaggaggctgatgacctggacatgcatataaatgataggatcgcagtcactgtggacgatttgaagtgtcggttcgacgcattcattgctgatgtgtatagcctgacattccgtccaaacactcatacaggcgaacgagtacttctggcaatcatgggctgtttcccttgtcgcgacaaaaacgaagatctcgaatttagaacccacatcgacatacacattgtgagagccagtcgtgtgcaggatcagctccagccacgggaccaacccgggtctgaattgaggattatcccttctgatcgagcaggacaaagccttgagcctcactcaaatcaaagggttgatctgaacccctccgaagtgccgcggcaaccgtcgtctgacggcaggcagccgacaaggccactgccgccgcactacgggggaggatccgataggtactacagaatccttgccggcgatgaaactacagcttctgaggcgccatccacttcgaaaggtgtaggcgaaatttcaggatcagatgaaggtcggggggagaggtgggcagagcacctggaatccgtaattactcaaacaggaccggatgtcacaagtcacatcgatacacaatcgtcaatgagaacgacagggggttcggcacgttgagacagatttggttgcagaagccacgaggctcgcggtgtcaaagtgacgttgttttgcggtattcttgaatgcgtgatcagtctgactttgtcaacctgtactacaaaggtttctcattcgccaaaagaattgtttcgtcgaagtcagtgtgcgatgctcatctgcccctataaagatgtcgtcgattcaattgtgagagcggatcctaccatattctttccttttgatttccccaccgtctctgacatgacctcagcaaagacatcttaaaacgaggggggagagggatcgaatccttcgtaggtctgctccaccgcctcggatgggccacgttggtaaggaaatgctcgactgacggctttaagtttgacgtggcatcagcaataaaaagaacatggaccagatgatcgtccgaaaattggtaccagctcacaggattaccagcttgatatcttttgcggttccactcagcgaaacccctttcagtgatggtctgcgtcaaaggagcgacgtcgctaaaaactaagaggtaagctgggacttgtccatttacatgattcagataccgtagtcatactgctagtatccggcaagctttaccgctgtagcctgtggaccgccttcggatacttggccttcgagtttcgttcgcactgtatctggatacgatcatgtcatgaaatccttgaggcagcgcgcgttgcaccgaatttatggccgcccgcgaaataatcacgccgccgcgccgatttaatcaatcaaaggaggccacgtctacaatcggctcagtcatcagtcatcagcttcaagattattagacataagtgatcggcccattcgattacaggcaactttctatgacatatggctatatccaacatacctcagctgctgtcttacgagaactctcttcgtattcccgcgagcccaacatcaatcacgagtcggatcaagacatgtcattccagagattagcaaaaattttcgctcgtggagggaagtcggccaaaggcaagtcatatttggagtaccaagaaactgccgacgagattaagaaggcgaagacacgtgaagcagctgaagaatgggaacggggagaaaacggcggcacattcaagatcaccggacatgaaggcgacactacatcatcgtcagcatttcccgaagattgtacgaagccggcctcagacgattctgtggtttggtccacggacggtcattcgcgaagagcgacagagtacaaggaggaaaagcctagctcaactattggtactttatcccaaaaggcaacttccgttagcaaaagtgatggtagacgcaacgatcgacaagctggagcatgatacatgaggcatgtaaattgacatacagaaaagaccggatgggatgggaatgggtaccactgagtcataacggatctgaactgggaggatgtatcttttgttagcacgattatttagttccgataattagctgtagtttttgtccggaaatggtgcgtctgcgtttcattcctccatgatcaattggacgatagagagcgatttagcactgtcgagacatcttaccccaagaatacagcctcgaggaggtttcaatcaagtcaaataatgctagtttctggagtcctagggggatgacctcacgacatcagatcaatcataaatccacagctcacctggctctcaatgtgatactacggcactcgacggtacgacgagataaatgagcttacggagaagcagagacagagagatcaaaggaatgttgggccgctaatcttcatcatgactcgttccatcaccgccgactgccgaattccggagcagtatatcaatgatgctcgtgaatgatgaacaatcacgcgcgggctgatcatcgtagctgcctcatcaggtgtatttattattatcggaagcccctaaaacgtattttttccctatcagcctttcaaacaatgggctgcctgacaggaaattgtaggcaactctgcaaatgtcccgcggaagaagataccaatgattcagcgtctcgacccatcgaactgcagccttgccagagtgacccatctcggccaaaagcgaaggtcgtctgccgtgtgccgagatgttggtcggcatcgcccaaagctcctaggcggccagaattgaacgccgagcctgcagccgtatatctggatccctcgagcagtggggcaaaccacatctatgtgacacagaccatgacagtagcaatatcggggcacgaccagggttctgtggaagacacaccgacctccgacgtgatgtcaaatgaggagactgcagctccaaactcatggagcaggcagagtgctactacaggaacgatttggaatatcgtgcgctaatgtaaatgccctcgtcactgaaaactttcagctccgatcagctcttaaccagatttctctatggtccgcgagggcatccacctctgcggaccgaagaaaagaccctgttccccttctcttaaatgtatttcgatccttatacgagtctctgatcggatcttcttaggtcgttccgtgtctgaagacttcagtgttgatgctacagcgaagcagcagacgatgaggccgctcgctgactgctccctcccgagatgccgacgagtacccctgggcggtctcatgcctgtgctgagcaaccgttttcaagccacgatgaagggcgacattccactcggctttaagctgaagaaggaggaacgtataatttgccctcgaatgtatctctatggcctaatcatgccgactctctatgttgctgagacaagacgaaaacccggccaatcatgagcgaattcttgaggcacactgacagttgtacaaagttggcacatagtatcagtcgccccgatgcgactatctcccctgccacagccccttcaatgctcttcatgtctacacgataatccatttccttcatgacccatgaaaggaagctatttgagacctcgtttcaagtttcccgcgcgaatgtcccgatccccttacaagagtagggtttcgcgggacgaggtccctttgcacgtcttgttcgggatgccagacgggatttccgaacagaacgccaacaaatacccactatatacccctctgaccatctcgatcagaccttaatcgaatacctgaatatgtccacagcatgctgctgcgctgacgtttgcggaacgctcgtcgggaagctgatagcctacacatgcatcaatccatgtgctggatgtgctgacgccgtcagatccgcgaaggctgaaaataccgactcgaccgataagcaatattctcaggctccgaacgcgatgagaatgaaaccggtttctagtaaagagcgggaagagcccgcattcgtgtcggacgcctcttctgtcgaaccttctctgcctccgtaaagtctcggtgcatggagttcaggtaattcgaggaacgctttttcttgcaccgacgcaacatcggcggtcgactcgactctcgcccccggatcgagcaggtaattcgatgtacgtcacagcatggtatcgctcgaatcatcattgttgagaaatgtccaaagtccgtgtccccaccctgtccgcctgcgaagcctcgtgcgtgatccatatgaacgccttcaacgtcccgtccggctgcaaaaatcaaattcgccagatcagcccaagtacagagctgttcatgagacgaggtgtgggctactgacgttcttgccgtttgggaggaggctggtcatgctctcctcgacggtcttcatcgtctcctcgtctagcgccgaagtaggctctgcagacgccccgcggccgttcgatgcagatcagaatcgcccttccgatcacacttgcgaagccgacatggactgaccatcgagcaaaacgatctccgctcctcccaaccctagtcctacggccaggcctaatcgctgagcttctcccccgctcaattccgcccattcgcgatcccagaggtaaggctcgatcccccaccctctggccagcttgacggcccggtcgaaagcctcggtcttgttggacgcttgggtacctttgcctcgacgggatgagaaggaggcgatggtgttcagaaagtcgtggggcgttccagggaggagggagggtcgttgcgggatatagaggactttggtacgatattcaggtaggcctgcggaggaatgccggatcgttttagctaggtcaatttgtatggcaagtgatgaggagatacactgaccgtattccgatggtttcctacgggatgacgtttgcgccaggtgatgaactcatggacgatatagcacatgtcatcgctagacggtgctcactttccattcagaaagacctctcccttgtcgtacacgttcagctcggcgatgcatttcaatagggtcgtcttgccgctacccgatcgtcccttgagaatcagaacttcattctcgttgagttccaggttgacgtcctggaaggtaaatcaaatcagcgatttccccagatatgcaagagtgagagctgtaatcttgatcacgccgatgctcacgttgaggatggccgagccggtcccatcgtcccgtctcagggtcagaccttgtattcggagaagcgagtcggacatgaccagtaggatactaaccgtgtatgacccgatcgcaacttgttctgacaataaatgggtagtgagtgtcgataacctatctccctcctcccctctctctagctgcaaccaccccctccccgggctttgtttacaaagtgaaatcgacgtcgtgtaggtcagtttagagggagggacacataaccgaaagaggtatcatctctaaacctctggatcgcttgtcgataacagccaaggacactgcaaattttatatatcatcgcacatatttcggaaccacaagaacggatgacctaggaaccgtcaacgagcgtgattcttgcgcgaaggaaccaagaatatcaggaacctcagaagaaccacaatcatggtggccggcccatcagacgagtcagtccggactcctccctgcggtccaagctgtatcatccagcggaatctgacctcctaattttgctaggtcatttctgccgcaaattgtcggagtatgttcgaggaacatgccgctcgggagagtttgcgttgacatttccgaccattcaggtattctatgcagtctttgaccctattcgcgggccaatcgtaccttatcaggtccccgagacgttgatctctcaacaagaagacctctcgaaatcggtcgctgggaccagtagtcgaccggatcgaagaccatcccccacgccaccgtctggaacacccgcaagatcgcattcgagctcgccaacccgtgcggcttccctcgcttccaaacgagccctctccgtctccccctcccggaccttccggtcggcttccaggaggtccccctcgcccctcacccaatcgactcatagcatcccttacaacccgaaacccttgatcgcacccgcgatgatcgatttcaacacgatcgccgaattcatcatccccaaagcgcccttgaaacatcgactggtcacctgttgctcggggaggtacaagatcgtcgggttcccctgtatgatcgaagacgcttcgtacgagaggaacgagtttattttcaacatcgcctttgtctttgatcggttgtccgacctgagcgctttcgagcctgtggtcaggaaatgcgggaggatcatgcgggccgccgaggtgcgtccgggggatgtggatgttcaggatcgtcgtctgatactgacacccgtgggtgccgaatttcgtagctggatacgaggtggctgtcgaacaagtcatcaccgtctagcattcagtccgtcttggaacagctacacgaggacctgaattcgtactctgggacgagtatcgtccttgacaagatcaattcgctcgacctttccttgttccctttttatggtacgtctcgttgcactcgggttgataatcaagtcatccgcgctgacgaagtaatatgtcacggcgacagccaatccaccggcggttcatgattggcatgtccctgtagcgctgatcgatttcaaaaagctcaaggatgcgaactgggacattaccgccagcaaagtgcatcgcagcgagacgctgcctggtgatatcgtccacatactgattgtttcgatccttacctgcagatctgccaatatatcgacggagtgcaacatgtcgagcggatagcacagctcgccgatgccgacctcgagagcgttcggtcgtgcatccagcatttcctgtgagccgatcgtgctcgccgcttcccatcgcgacgcgaatcgaaactgacatcttccgtctgacaggtattatcaggtggtcatcatgatcgacattttccagtactcgaacatgtacacctgcaagcctgccatccagcgcaagatcaaggacaagagcgtctccgaggaatgtggcgcttatgttacgcatgcaggtgagaccccgagtcatggctctgcttttgcttgacccgaattgagcgtccacacctcaggattcccgatcccctcatggccgatcctggcaatcttgtactcgcaactccgacccggcattacggtgcacgaatggatggaaaccaacgaagtccgttcgcgcgggatcgacgttcgccggttcgtcacgtttgggatcatcaaagggttcctgaggcgggttcaccgatggccgatccacgtcgatacggtttcgggaaacacgcgagattcggggcggcatcggtcgaaagaccgagcgaggatcggcgacattgacgaggagccggccgtcaacgaattgaccggcgggttgaccgctctcaaagttggagacgggatggggagaaaagatagcatgatgacggcggccacggcggggacgagtgggggtacgagcatccccggacgaaacgagtcgcaaattacattgcgcacgacggtatctacagcgggaagtctaggtacatcgcccaatctcggtggtgggatctggcgcgcacgttcggattcgccgttacagagtgggttcatgcaagtgactccgatgacgggtcgtcagagcgggagtcaacctgccaacccgctcgggacgggaagcaagagtccagggtatttccaaccccagacgtcggccctgtcgtcgagcgtacgatcggccaggggacacttgatctcgacctcgcacaacaccaacgcttccgtcactcggggcggttcctcgcacaattcgtctggccagaccggtttcctcgaccccggacgtcgacccgtgggccatcatcgcaattcgcgcgacgcccggacccgagcgggcgggctcaagacccccggagcgattccccagcgggaacaagataccaacctacacgcgagcatgttgggttacctggatgggtctcatcatgccgacgagctgcaggtcaagttcaaaatggggtggacgaggttggaggcgcatctccgcaagatcgcagggttgccggacgaccttcaagggttgaaagaggagaagcgggaggccgtggggaagggtgattatggaaaggtcgtcgtcgtcttgcgatgagtggggaggtcgagtagcatgtggtgtccggccgggaggagggcgcgtgcggtccgacgtcggtccatgccatatcgacgtatcaagctcgatcctcagacatccatgaccttgcgtttgatcttcctgacccggcctttttgttcgggaccaatgtctaccggtccgaagcgtttcaagggccacaagaggtaaggcactttggccgtgatcagtccgagcgggacctgtcgagcgagagtcctacgatatcagaaacagtgaagaaagacgaattcaggggtgtgacgacctacgggtccgtaggtattactatccctagaatgatagtgagagtcaccttcgacccagcaatgaccgggaggcacgcggatcggcgtgggtggggagggtggtaacggatggacctatgaggagcacggtcaagtacgtggaagtgagctctgatggccgactagacagacacaaacgcacactctccaaacaagaccacttaccaaatcgccttcgagcgcgatgatccgtttggtcgtcaacagtttcgggttctggggtgaccacagcgtgaccacgtccccgcgtttgtacaggttcagagcgacgctccatcgatcgaggaggacgacgtcgtggtgcaaaggtgccgaggcgtgtcccgggttgaacgtcggttgcatgctcgccccagagacgctagcgaccgagtagacgtgtcgagtgaagaagagggctgggggtagccagaagaggagacgtctgggggcagggagtgagaagtggtcagacgcgagtcgagcattaggggagagtttcgggtcgacttacaagccatcccgaaagtgtttcgaacgggtcgccatcgcgatgaaaaggatctgttcgtacgggatgatgcgagccagggcggtgtagttcagtacgatagtaaagagtatgcttgatattaaggttgtcgttgtaatgtcggtagtggtggtaacttgtcggtgacttctcttctgagaacgcatatcacgaatttgatgttcgactctggatttcggaagcagatgacgaacctcggctcagctcatggccccagtctgatctgcacaaaatcatctttgacgacctcgatgttatagtcgcgagatttgcgagtcgacttcttttcacccaggttgacaagtagcaacatcgcatgcttggtagatcgctctatcgtttcgtcgcactcatttcacgtacaacgacccgcaaaatgtcatccgccatccccatcaagacctacactaaagaggccgaggtcgccctccacgccgtcctcagggcttgtcatgtgtaggtccacgatatcatcaatgaaaagctagtatattgctacacaacagctgactttgataccgattcgtaccgtagtaccaaatcggtgcaggataccctcaaggtcgatgacaaggtctccaagcctgacaagagccccgtcaccagtaagcccggttccggcacagtcctcatctcgcagaccctcattgcatcctccttggcttcattcctgctctatcgggatatcacagtcggggacctcgccgctcaagctctcatcactttgcacctccaggaatctttccccgaggacaagatcgtcggcgaagaggacacgaccgagttgcgcaagaacgacggtctcaggggaaaagtcgtcgggctcgtgaaccaggggttcgaaaagggtaaactgggcaaggagagtcaagggatttggggagagggggagacgttctcggaggaagagtgagtaggggtcgatctggttacaaagcggtgcccccaccaacctgcaaacaggaaactcacgctcgactgttatacccgatccgcctgctagcgtgctcaaagccctcgatctcggttcgcatgaaggtggtgcccatggccgatcatggaccatcgatccgatcgacggtactctgggcttcctgcgtaaagagcaatacgccgtctgcctcgccctgatcgttgacggtgtcgtccaactcggtctcatcgcctgtcccaacctcggaacgtcctccgtatcggacagctcgaccggagtactcttcctcgccaaaaaggacgaaggcggatggatgagaagtttgaaggacgacgctacgtgggaacggacgactttgcctgaaaaccccaacccgttgaggttcttggagagcgtcgagagtggccattcggctcacagcgttcaggccaagatcggagagttgttgggcgtacaagaagggagcagcttgaggatggacagtcaggccaagtatggcgcactcggaaggggagaaggcggatgttagtgagtcgcgcggccaaggttccctcacgtcccgacgctatccgaatgagactgatgtcgagaaacccggaaaccagtttgaggatcccgaccaagtacatcgggggcaaggattatcaggaaaagatctgggtcagtcgaagcatcgtccttttcccccgcgtgactcgctcgacactgatgcacccgctcggctcataggaccacgcctcgggttccctgctcatctccgaatccggcgggatcgtcaccgatatgcacggcgctcccctggacttttcgttgggaaggaccttgagcgccaacgagggtatcgtcgctgccgcccgtggggtacacgccaaggccgtggagagcgtcaagaaggccgtcgaggagtttggaaccaaggcttaatggatgaaggaaataagagcagggttggtgacggtacggcggtcagtaggaccaggcaatgtatatgtccgcatccacaaggaagcgtcgggcgcaaacaggataaattgcaatacgaaagtcccgtctagtggtaccctgtcggccttgtctggcatcgattcggtgtttcctcctgtatcattgctgtttcaagaatagctccacggtaatcctacagctttgaccattgatcaaagcttcagtctcgacatcgtttcaagctttgtctgtggctttcgaattcggttttgaccactcaccggatcagcatctcactaacccatacaacagaggtgattgccgaggacctcacaaccaggttatctgatcagcgtaccaattgcagtgagctgaagcgtcctagacagctggccagaccggtcgtcatgattccgtatcagacaactcatttcgctgttcgaccgctccgtcgcgctccggcaactttggtggcgtctggtcgcagagacagctgtaacccggggagacatctccctgcgatcgtcggagcgccttttctcatcttccagtgtgaacgaccagccaggtacgattccaaacgctggaatccggagaaacaagatcgatgacccgcacggaggctttaccgtttcccttcaaagcacagctcgacctcggcgatctcggcgtcgctcgacggagatttaattgcggtgcatcttacattgtaatcggcacgttggaggtcgtcatgagatcgaaggacttttgttctgctcgtagcaggtcacgacagccggctggattggtcccggtgcgtgtctttatggcgaagataccgagatcgattttactaggtcatgggctggcaaggctgaatcgggccgagtacagacaatttcgactctcggctcggcatgtaataagtttcctctcagagtgtgagatctgcatcgagcgcatcgaacatgattaaaatattaaaatgatgcatgatcatgtatgatgcatgcaatacttcgtcagatcgtcagacaccagactcgcagctggagatccgtccagtcgcgtttgtcgggaaagctatatgctatatgtgatgtcgcaagctcgaacgaggtttcgaagttcgcctgggcccttctagaagctagaagagcacgggcggatctcagtcccagctgccagctatcgctatcaacgattccgagcgttccctggccactcaacgcgttctccttggtctcttccgccaaatccagcgacaaaggacccgatatgccttttgttgcatcatcaatagaaccttaatctccgacccttccatcacatatccacctgtcgcttggaacttcaccgtttccccttcaaccgtcatcgtcggttcccgtttcgcaaggcaagcgatgaaggcgaccgacgataaattgaggaagaagaagaagacagcgccgatcacgcagagacgtttagccggggccgtttttcggatttccacgtttccctcttttcctgtgcgtctcggaggctattggtatatcctggtccgcccgctgcgggcgagcgcgttgacgagccgatgcaaagtcaagtgatcgtgaacagctttccgtctcgagctgaaacggggtggcaagaagttggagccaagggatgagcttttagaaaagggagaatctgttgttcctccaccctgctcccccgggccctcgaacggaatgaccatgcgtctgttcgggggcaacgggtcgaaaagggccatgggcggatagcgttggaattgggatgggcgttgaaaatgtacctcgctatcggaaagctgcgaagagacgagaatgagtctgtggtctgggtacgacattgacacgggaaggcgcaggaactttcccgtcgtcccctcgtctaccgttcgttctcgtgcagccaatcctgatatcccctttcgtcatgatcgacgaacttctcgtcgaggccgaggtcggaccgggtctcgggatcagatcttgcagccgagacgacgtcagggcgcggaggaggagcagaaggagaaaccttgtaaaagtggcatatcatgcaggatctcatcacataaacttgctcgacatgacgcacgatcaccaggcgcagccaccacaagcatcctcttctgggtcgcattagtattttatataaaaaaaagggagtcaacgtcgcgagaatcgtaaatcgacgccgccaaccgggactttcgaatttcgaagggatatatcaccaccggtccattaccttccgtcgccatctttaaccgttaactcgacagtcaccccattccgggcgatctcctttgcgactttcacgtcgtccagggtgtgaccagtggtaaactttcagcgaccaattcggcgagaaagggactcggttcgggggagacttttccggacccttgacgatcagagggtcggaagaggatacgagatatactcccacttttcccggaagctcgacctacccggcctagcgattacgatctcgacacccaccgacgatcattttcgagcttctcacaattgggacggccttggtacgccacatctcatcaacaagacctcctatattgctttttggtgacttatatactctcgactctcgaaagacggggttcgagctcgagagacggatctgccatacgtcatcgaagatctaaaagtcggagcgagaagcatgctaaacggcggtacgaaatcttgaacaaccagcacatcatcttgaaaatcagacggcagactagcattggctatcctcacactcttcctcatattctcctcacccacgatcaccaacttacattacgaagcaccccgaccgatcgtcacgacggaaagaggatcgtgaattcaaacctagaggatgacagccatcaatccacccacatcctggacccagaccggtcgaagagcttcggaaggcgacgctcattcggtctccacgaccacgactacgccacctctcatcggagccggagctggtggggcgttcgagccgcaagaaggtcgacaggaagcctatccatacgacacgcagcatcaatcgtatccttcccacaattatcaggtcgatcacgaggctcagccagaggactcgtcgtcgacgtttatgtcggtgagcgacgtcggaatcgccggctccaatcccttgccgcctagcatgacccgtgcgaggtcgagtaacgagatctcgatcgtcaaggccaagcctcagtctgatagcggaccggaagaagccaccgatgcagaagatgccttggctgcagaggaaaagttcatggaaggaaggttacgctcgatagccgcccgtgcagagcgtttggagcctagtgcgtctttccccgtcgccctggagaaggccaggtcgaggcgggaacacgaacttgatgggaggaggcatgatgctgagctcgacgaagcgggtgcgcggcaggtgtacgagacatccccttcgcccattcctcatggatcaaattcgtttcctctcctaaacgccgggcaagcggggggagccaacccggggcaagatgtagagcccaaggcgcagttgcccttggtccttccagattatctattgcctacccaggctggttcggatcgaccttcgaatcgacccgacctgatggatctcggggcgtaccgaaggatgcaacatcagcagcaccatgggtacaacaacggagggaatgggaacccgtacaacgtcgggccccacggtccttattcaggaatcactccgccctcatcctcacactcgccagtgtccatgatgtaccccggcatgcaacgaggagatcatgtcgtcgattacctagcccatccctccgcatacgcatcaggttcgaccgggctcaacgggtcgggcggcggtatgaatccgacagatccagctttctaccgcccttcgtcggcatcagcgtcctccgttccgagtccttacgaaggggtgaacaatccttatctcgctgcatcccacacgccgcccttgccagggatgtacggtcaacaaccaacgtactacaacccatatgcaacgccgcacgacgctcgcggagcttatctgagcagtccggtcaacagtccgcccgtcagtccggccatggggatgaagccttggctaccacccgtggacgacgattcctccgtccctggacctcagacgaacagtgcgaggttggctagcccgtccatgtcctcgctgtcgccttcgatggcgcctgcgcaattgccaaacatggcaggtggatggaacaaccggtggcaaggccagcccgcaggcatgggaacgacaggaaggggacaggcgggcttctatggagttccttcgtgggaccacgaatcgagggcaggcggcgttggaggtggaaccagagggagtcgaacgggccgaggagacgcgcccaggaactttggagcgggcgagcctgcgactggcgtaaataacgtcaacggccgtccggggccatccacgacaagacctaggggaggagcgacatttcgaccagctcagcccggtcataccagcagtttcggatcggctgttcagaatatgcctgttgaggggtaccttggaaatggctacggcaacgggcctcaaggcggttatcacaatggtccatcaggatacgttccatatcaaactggttattatgcaggactaccgtcatatctcggctatgcgcaattagctgaggctactcggcccgagatgccatcgcccatgacgagtccgtataacggtcggggcggacgtggaggtggtgtgtcgggtcggcggggtagatggtcgacaggagtgaatggacccgctggtggaccacttcaccaggctcagggtccaagaccgatcagcccggaaggccaacagggccacaaggccaacgttaagtcgatgtccagcattaacgatgtttttgagcagatggtgctcagttcggcgatggggccgatgcaagatgcggcaccaaaaatcgcgggtcccggtagctcgggtcaggaggacaaacgagctgctggcaggaaacattatcatcctgctgcacctcctaaccggagcgaatgggtcatgtgggttggtaatgtacccaacaattgtaaggctgataaggaacggcgccctaccgcatcttactaacagcgaaactgcccaattatccagccacacacgaggaaatgtggaatttttttaatcagccgattcctcgcgaagccgtaccgtcgagcattccttacaagcaaaacatcaaggtctcgtcgatattcctcatctctcgctcgtcctgcgcgtttgtcaatctcgaaactcaggatgagctgctactggccatctccttcttcaatcaccgcctcttgcggccatctgatccgcgatgccctaaattggtctgtagagtgcgcaagatggacgacgaccttaaagccggagttggtggtcaacgaggcgccggtattcacaccaaatacgtgcaggatatgctgactcgacaaaaggccgaggctgagggaggatccatcgatgtcaagacgcccgaaccagaaactcctttgagtccagctgcaatggaattcccgcccgagggggagggacgcagacgatcgagcgtaatggccaacgtaatcacaccggcagcgtttgcagcatggcagcgcgagcgatctcagtccggcacgcacagtttcgcgtccacaaattcgtcgttcctgggtcgacatttccccaagcgttatttcatccttaagagtttgacgcatgtgagttttggtctgggggagtttcgggatgactcgccgctccatgttcaacgcactcgattttgcaggaggagctcgagacgagtgtcaagacgggcaagtggagaacgcaactgcataacgaggcgattctgggtgaggttgctcggccataagctgggaacaggggtcgtgctgatatgatcgtttccgttcttcagaccaagctttccggacttcgcccgaggtatatctgatttttggagccaacaagcagggcagcttttacggttgggccgttatgcgtagcggaatcaatgaccagaccaggagcgcacgtagcatctcgtgcggttcccgtggtccattcccatctacgcctccatctggcacgaacaactcggccggcacacaagatcgatcttccggttcgacttctcgttcgaacgatgacccgtcgacgaccaagtcgggtcgaccgaggatccctcacgcctcgtcggatcagttccggatgaccacccaatcacccggagaattatctcccagcgaagagatcaacttttctgccatgcgtttaccgggtgaagggagctatcccaaaccgtcgacgggtctggcctcggtccccgaggcggaaagtcgatcgaacaccctgaacgccgaagctctggcgaggatcagggcgggcgacgtatctcccttcaagctggatgacgacgcgccccatcgggccgcggaacgacgagccaattcgaccggatcgcaagagagccaagctggcaagtcgaacgatcgggatcctgccaaggacgactcgaagctcggttcggacaagcccgatggggatgggatcgtgaggcacgacatggcctctcccatctcccacgacgtatcccacgcggtggaagcttctggacccggacctgcggagaaccagctagccaagacgggcacgacattcgagatcgaatgggtcaagacgggtatcctgccgttccatcgattgagacatctgcggaacccttggaaccaggacaaggaggtcaaggtacgtcgaccgggttcgtagcttttcgctagatagagctcgaggctcaaagatcatcgtttgtgtttttctccattgacaggtcagccgagatgggaccgagctcgaacccagtgagtacttaggggatggtccccacgcgattgcttttcgcgagaattgatactgatgcgggaccgattttgcatctccctgcgttatcagctgttggagcgttgttgctggcagaatgggacaagctagacccggtcggtactattaagttttcctgagctacaactccagctcttccttcgccaccggatccgagcggagcccgaatggaccgcagcgagacctgtctcttacacacatctgacgctgccgacgacttaataggtgtagatctcggtggtcgccgtatcccctcgccccccgcatttccacccctcacttgagtcttcaactcgatgctgatgattcatgccatctgaattcgcgatgaggtcagaccactcaaagccaagttgaggttcgagacagctgcaatacgacaacgatgaacggacacgctgatcggaatcacaggccggaagacgcgctatcctcaaagctgtactccgtcttcgaccaggtctgggaccgccagtatggcatctggacaaaggcacctcccccaccaaaggctctcggcgatggccaggatgcgttcgtcgcattcaggcggaaatccgctactaccaacaacgcggatccgttcactcacatcgagttgcaagatcaacgactagtccaattccttaggacttgtttgccgaccgaagtcggccttttcaacaagcccgcgagcgtaaggagaaagtcgagggagatcggatgctatcctttcacttagtctcttcttttttccagattgacgctcagttgctatatgtcagccgaaattcggtgttcaaggcggcagaaggcatatcagcggatacgggtctagctagggcgatccatgctctactggactttgtcaaggcagaatttgccgacgtgtgagaaatcacctctgggtttctagacaacctatgaatgctgactcgatgattttaatctagagaggaaaagttgaaggttttgcccaaaggaactatagcttggtcgttgctttggttgctgttcgaagttggccagcatgtcgaagtcgtctacgaactgactggcgaaaaggtaagtctcagacctgtgatgcttcgcatcatcgggctgatttggtgaaaaagatggccatgcaagtcgaaggttgggcgtatgcgatgtctcaaaagggacgaactttcaacctgcacggacatgtctttcagtggacaggagttcgaatccagaagatcaaggtgatacgaaagatattggaattctcggtcagtcaagcgaaccccacctcgcttgaagaagggctaatcagacgcctttgcaatagaaactgaaccctatcgcatcgctgccggtgaggcctcttgacaattgtgttaaacagcaattgataagtatgtagagccggccgaatcatgacagttgccacacattgacaatcacgaatacatcgcagaccggtcaaagaaatacctggaggtaacttcccgacctctttatagattcagatgcccatcccgttcgctgacctcagtccggaacagaactgcggccaattttaccgcggatacaaggggtcctttgtcatgaaagcgcattctggagggtgagcaaggtggtgactgactcgatcagccatggtcgggctcgagtagctgatgacgttcggtgcagattacgtgtcaacggcgaaggccgggtcatgattgatgttagacagtttagacgctccgtgccggttcttgacgtctgggagtaagtgagacgtttcacttaaaattgatcggcacgctgatcgacgtaaaatgtttaccttggtagcgacgacgtcaatacgaacgactcggagattgttgatttgagcaatgatctggactgggatgaaggcacaaaaagccacctattgcctccggccattcacggctttagcttcgtccacaaaaaatggggagaattctctgtcgacaaattgtcatctgttctctgggaagacgccccttttcagcacctcgtattggcagactcgtatcgcgaagtggtgcgatcgttgatcgaggttcactcgagcgacaagaaaggattactcctgaatgacgtggtgcaaggcaaaagtagcgggtgcatcatagccctttacggaaacccaggatgcggcaaggtgagtcgaaggaatcagtcctcgtcatgacctcgctgacgatcggactggcgatatagacgctcaccgccgaagcagtgtcagaacatctcaagcgaccattatagtgagaaacccaggaaatgatctgagttctgcgataaaatcgctcaatgcgatggattacgttctgcattgcagcgctatctcagccggggaattaggaacttcagtatctgcccttgaatccaacttgaagaatgttctagatgtgaggttcgtcactagcggagacaaggacagatgtttgacccccccgttctatcagctggctacctactggaacgcagtgcttctcatcgacgaggtgagcgccgtgagcgcaggtggtcggaatttctactgacgacccgggtcgcacttatcaatgtgcaggcggacgttttcttggagaaacgagattcgcacgaattggagcgtaatggactggtcgcgatcttcctacgcggtaagcttggtctgtcttctcggtccgaaacaggtctgacaaggaatggtgctgtagtgctcgaatacttttccggcagtaagtccgtgtgcccgaggacactgctcaagcatcgtctcagtcgtttgcgaaatttgcagtcttgatcttgacgacgaacagactggagaggtaggtatagatttttttgggtcagtgggacgcgcagaccgctaaccggatctcccacactcgcagcttcgacaatgcgtttctctctcgattctccctcattttgaagtaccccgatcttgatttcggcagccgccgagttctgtgggaccgggtaagctaccggtccgtacagcatagtccaagtcctcgcctgacatcttctcggcaccatctcaagtttctagtcatggccaagtcgaatcccgagctgtttgatctcgacaagttggccgacatcgctctcaacggacgagcgatcaagcagaccgtgaggacggcacaagcgctagcgttgaccaggaacgtgccacttgatcgctcacacatcgatactgtgctggagatgaacgtcgcttgaggggcgagtcatgcgaaggatgtgactgcgcataagtgtacttaaagcgagactttgtcaaagactgatagctgctcgagcgcctgtattatcagaaaatcagaatgacgttccatggaaacggcgcactttcaggcacgggtctgggacatccttattaggagccgctcttgtaaatgctctcccgacgtaatgaccagagatcgccttaatatgagctatagctgaaatcgtaatgtcatggttgtacgttatggctcgaacgcctcatgtcgttagggcggtcttgacaaacaaggtagagaataggtattgggacatctggctgtcaaagaggggaaggtaccggtatcctgtggtatttggaaggagaaggttaagtgcagagccttgaaaaacctgattcgagacgcttgccttgttcgagcgtgcccaagctgccgcagtaatgcgcaatggccacgtcatccccgatcgtcaccgcagtcttgatctcgaccttgacaaatgtaagatcgagtagatcactataagcgtcaaaactcaatcggaggttttctttccaaagaggattgtaggcgttgccattgacggttttcgtccgaccggagcaagtatctatcgcggtcgatatgccagccgatttgctagcgttcagtccgatcgagctgacactctttgctgcgtcgatgccaggagcatatacgattgcctcgatatacaatcggctgtcatcgatctcgacatctgacggcaatggaagggattgccccgataatatctgtccacgtgttaccgtatgataagctggagagactatagtacattgccctttataatcgcttacggttagatgtagaatgtggcgttctttttgtgccagtagctccttgcttcgcgatcgtagagcggtaggcttcaggatgtatcccgaccgaccgttcctggcgaacattgcagcgttgaaagcgaagccgtcatctggtaaaagaagcagaactgcgcttagccaattcagtatattctgtacccagtcgttataacccgctcaccacaggtctgccaattcaaggcgacgagctgagcccccatggcccaaaagtggtgaggcaagtaattggtactggtcaagcgagtaccacttggatagaccctcgaaagatgggctcgattgtgcttgatgaaatcgagcggtgtagctcgaagaatcttggtgccaaccttttcagagacggaaaacatctcttccgccttatattccactagtttgctgaatccgcgatacttgacgccagcggtgtagatcatcaactcggctagctcggggacgatcttttgtttgccactcatcttcactgccgagctggaagaggaagttcgccgcataggaaagctatcaccgcgcgaatccaatgaggaagaccttttgggcattcgcggatttccttggccaagagagacgggaggcgatgcagggggcgaggtagtgagctgggcgactctggaggtgaccttgtcgagaaatgtccgcgctctcggactgcgagctacatcgaggggaaagtactcagcgacgatccgaatgacacggtaggtcgacttacagaggggatgatctggctcggaggattcagtcgtgtcggttgaatctgaaatagggggcagagaggtagcaccagcgtcggagccttgcacgggttccagcgatcgtttggactggatacatgcggtcccggttagcgaatggcagagaggccgtacctgcgagtagtcgacagaccttgaagaggatcctatacttcaactgctcggggctcggcaattcagctagctcggcagtagcttccgctcggcgaatggtgtttaattccgtggtgacgagctgctccccaaaaacgtcccggagaatgtcgacgagcttgagttgttgttccggcccgcaatgcatctcggcagatatgatgatcgggtagggcgatgccatgaaggcataagaagcgatcgcgacgcagacggcacggacggggaccgatccggtcaacgtctttccgtgatacacgatgggttcatcgtcgccgtcatatatgtccactattgacgagcgttaggggtgagtcgggttgctagttgcgatggttcttattttgaaaacggtacgtactctcgacgcttctacatccagcaagcaatgctcgaacgtacccctcgacggtactttcgcccttccattggtgaccgatcaggtaagtattgtgggagctcgatatgaagtaatccggtagcggcctggtcatgtcttgacagaccttgcgttgggaaggatgcaacaccgcattggccggagatgagaggaaagaagtgaattgttccagcgagagccctttgggatccagagaggttgcggaaatcggctcggacgccacgagactatcgtcgaatgatgaactttccaacgatgtggattcgccgttccaagcttcggattggcggacgagtccagcataaatcctgttgatttcgttctcgggcatagcagtcttttgcacctctcgaaggaaccctccgaaccgcttgatatccagcggtccgtcccgtgtcagagattcgtaaatttcctgaatttccggttgtcgtttgagcatcttgagcaggagcgtaaagtcggcgatggtgaggtgacctttgccatccgtatcgattgactgtgaactgatatcatcagcttcaggtcaaaaccaaggaagcgcggcttactcacccgacagtatttcgagatgacggtgttactatcattgatgacgattcccatccgcttacaagccctacagacttcctcgtacgagatcttttcgtcctgatcttcgtccgcctggatccaacaactgtccctctgatgcagtcccatgcccgccacaccaggtttatcgccggtgatcccgataacacctccaccggcgttcccagtcccagtcccagtgccatttcccagggagactgaaatcccgcggatagctccgaggaggttggaaatggtctccaaccagagatcgaaatcgtcatccttgagagcgacaatgttgagcgttttccacgaagctgggagttgggtgtagacgatggttatccagcgggtgcgggcggattctgtcaatcctgggactggttgggacggggaagctgattgtccataacggacttctctgatctgatccatacggacttgatggattcaaaggtcgacccagtagatgtggcgtcagcagagttgatgatgccgatgctcgcagcagctcgaactgtcaactcaccgatacccagtttgcggctatcccatcgaatactaggtccctctgcactcagccacaccgtacgttgtttgactttcttgttcgagagcttgatcatcggtacgccatggagcaagatactagggatctgactctggctagccggctttgcggaagcgaccgaggcagtcggtgtcgagattgaactagagttgtccatgatgtaggttcgtttccgactatcatcaactacgcaaagaggtggttggatgtccagtcttcatcaaatcccagcaaacgacccctgtacattcataagatgaaagccaaggcaagaactgtgagctttcgccaaggagttcagcgacgatgggagatccagtttcacctacgagaaatgcggacccggccgaggtcgtcttgctgcggcccgccggaatcccgctttgtttcgcagctctcaaagtacgaggctctagtccaccgctattgttcgtcgatgaccggcagggatttgagccatgacgacgatctgcgcagatgttagttgtagcgtgagtgggatagatcgaagacggatcggaaagcaagacgagtcattcgtaatgatatcatcatgtggcatgtgtgtgtggcatatgtggttggtggttgactgcgagatttcgaccgaactaggttgttggtggttgttgacaaagtcgggaacaaactcgttgcagctgcggagcaatagagtcatattcaatcgttctaatcatatcctcaacactcgtcgtcttccaatgccaacaacattatatcatgtgcgaccacaggtcaccctctacggggcatcgattcaggacaaaaccaaagagacaaaaaggggggccatcgtccgttctcttcgcatcactcgcggatcaacctatcctcgccttgagctttttcatcaagctcgtctttcgctgtactcccgatccctcggtaggcggtttgagcgtcatgtccgcaaactgatcgttgaagacgggcatgaccggtgcgggcggtgggggcaacgccttttccctgccacccgccttggcgccgtacccgggggaaggtctacgcggctcgggttcctgggtgatgaggatctcttcccggggctcgacggggctagggggcatggccgccacgttgctccggctagtcttgcgacgacccaagaacgagccttgtcgtcgaacgcccccgtcctcgcgccccagttgcagggtaggcgggttcgtcacggcttctcttggttgttgtccgttggtcgccgttccctcgtccatgatcccgagcgtgtcctcgttccacggcgaatgcctgccagccttgactgagatgcccggcgacccagtccgaggcataggcgcgtcagaggttacaggcacgttcgggttgtcccgctgtgcgaggcaggtgtgttcagcggatcatcccagtttcaacggtcctgacaagactcgaacgacgtaccatggccctgaacctctgcatcagactcctcgtcctcttgacccccttgccacccgcattcccatccgccgtgggcccggggctcaggacccgatcgccatccatcgggggacgacccgtaaagtattccgatttctcggcggcgggactcggggtgtacctgttgttcccgttcgcgttgcgcgaggtcgtccgcatgatccctcccatagaaagaccgccggctttgcctggtgatcgggaaccctcgttggctggtgaaactggcagtgtagcaggttcggcattgtcgttgactaaacggagtgggggatcagctcgggtggcatgatgtcgaaacagatggaccgcaaaaaaggtgccgactcacgactcatcgaatcgacatcgttctgcgcatagcccccaaagtcctcgtacggctcggctgcaaacgatcccaatgtcccacatgcaaatctgacatcagtgacgaacagccgacactaatctcctgcgacgactcacgttcgtcgatcccccacgcggcctgcaaggcccgtctcttttgatccctctccctttgcctgatcctcctctcttcctcttcctcgtcccctgctggacccatcgagatcctcttgcccggcgatcctaccgcccgaggactccccgtctcaaagtaccctccactgctaggcagattgttcgagtattcttcctgcagggatccgtagatcccgggagaattgatcgaggtctttcgacctgggcgggaaggacgcgcggtcatggggatcgctccgctgttggtcagggaggggatgacgacctcttgttccagccctggagaggcctttgggtcacctagggtgaccctggtaatgctcccactgcggaaccttccttgctgaggtcgagcctgtccgacaccggccccagctccagcccccgactgtgccatggtcggcgttggcgtcgaggtcgtggtcgtttccgtcacgctctgtaaagccttgacgtcgagctcggtgaccttgctcccctttctcgggtcgaaaacgcccatcggggctctctcggcacctcgctctttagcatcgttcctcgagggtgccgcggcgtcatacggtccagaatgatgccacatggatttccccaacccggatccgtcccacttgtcgatgacgtcggcgtgacgagaaggacgtttctcgacgggcgcgacgagacggatggtcgatgtcgaggtggtattactattgttcgggatagcgtccgaggaggccggtgcacgacgaagtagagggttcgaagcggtcgtcatgatggagttggccgagggtgttcgagcgggtccactggagctgtcgtccgtggggcaagaggcgtgatggatgtcagtcgaaatgtagcttctagacgggccaggacgtcgggctcaagcaggcgggctctggatgaaggtgaataaggtcgaccggaaggtgaaggtcaagcagctgccggaaggacaactcgaaacaagacaaaggggtcccgttctgctgacgtttctttgtgaacccccttccctttttcccatcccctcccattcggcccaaactccgtccccattcacggacactgagcgtggtcttgcttgctcatcttcgagactcggccaatcgtgaaccgacggtgtccccttccatgccccacccatcagacaccggatcggcatccaccggcccgatcgaaaagtcgaacgaacgagaggaaacccaaacccgaaccccaacccccaactcgaactcgaactcaccctgatcgatcaaacctgaccctgtctttacctacaaccccgcgactctccccactggcatgtacgatcccgcctagctggttatccgatcgaccggccggttggtcgatcatcccccctatcaccgcggctgttccggggggaacaggatccatcgtcgtcgtcgccgcgtacttgtcgtcgaacggcgagttgctcctacgcatctcgttcccagcctgtcgggcgtcgatgggattcgagccgcgtttgccggtggtggtggttgtggtggtcgtgggagatgaaccgaaatggacggaatctctgacggcggataagagatgaggatcttgttgtagattaggcgagcctgttctccgttgatctgcagcggtaggggcgagttgatgacgattattatgaaaagagttggtcatcgtcgtcgtcgtcgttgggaaaatatcgttgacgactcgggtatcgatctcgtccctcgaccgttgatgttgatgttgatggcgggacgacgattgttgataaaggtggtcgttgttcggcatattgattgtgcaagcgggaagactactgggtgaacctcgtgttttgacgtggaatctccgcagttacttgtcgaatggcctcgataagctcgtgtttattcctcttggcttgcttgcctttgcttgaacgattgacctggagcagctggagcagagtgaggtcgagttcgagttcgagttcgagttcgatgatgtccaattccgatttcgggtgcgtgttgtcgcccgccaaagtgacgcacgcgagacagggcacacgcaaggctactgcaagctgcagggcagagaaaggttcgacgacggttatagattatagatcaacaacgatcagacagagtagagcagtagtgactcgggttatgagcttgtatgtacagagtagatatatcccgacgagcggtactactactgtactgtgtactgtagttagtagtagttggtagctctgaatagaccatgccctgccgtaccatgccatgtcagcctctgcggcacacacgctcgcgcgggaatcgctcgatccgggaataaaatcaagaaattcgacaatatgctagacacgacacacaccagagacgtaaacaaacacgcaaacacatacacacatacacccatcctcgcatcatcctcatcatctcgtttgccgcctagacgtaaggtgacatcgcctgcaggctgcaaggcagggacgctcgaggtgttccatcgcaaaacagccgagcctagagatcactcaagatcctagaatgcaacatcatccataccctcaaccacctcgccctccgctcagacccatcctccctcccgctcccacccgacctaggcgtcggcgtcgagccagtgacctgctcctcctcgtcgagatcgagcaagacctcggagatgtgtgaaacgacgtgacacgggtgtacggtccatacgagtaatccatcgatcaacgggtgttgttccctcaagatcagaggaaaggccgagtctgttgacgttattggcaagtgttcggaatcgatgtcgacgtcgaggtcgagttcgttacgatcgggctcacgatagagatcggacgaaggcggacggatgatccggtgttcgagcatttcttgtaaccccaagaccgtaccatctgacccgtccgtaccgagccgaacagaagatgcacacatatacgtgagctctctcactcatcaaactcggcgatcaaaccctccggccctcattcgacatatcccagcatcaacatcgactcaccctcatatcctgcggtaaagcacaagctcgggatccgataagtaggatgatacacgatgtaccaatcgatccggatgaccagtaacagttgatctcccgttacgcgttcgatgccgctctccgaatgtttctgctcttcctgtgtgtttggaggtggtatagaggttgagggtcgaaaggagggggacacagccgcctcatcctcttcctcctcctcttgttccaacccggatcgctcaacctctacccgccgtgccgaacccggctgcgtcgtttgccctgtgttcagagatacggccgacttttccctgatcgcaggtgaagaaaaatacgatgacgccgacgctatacgaccgatgaggttgggtcgagggacgttcctgatgattttgctctgacgggtgtgataccccttgatcgtcgacggtcctacgaaacgctactatatcacatgcccggggaacccattcagtcggacgggctcgactcgtggtttcgcttcatcggagctcggtcgatgaaaggaaatatggtatgacaagagggagggaggagggtggggcttacagggtcgagaggtactgtacgatattcccagcctgccatcatcctctcttgtctctgcttgtattcgtcaatcgacccggtatcgtccttcaccgtttccttacgattaggactctgtgaaaagatcttcaaggcctctagcaggtcatccgggttgggaaaggggttgtccgtccaacttgacatcgtcctcgatacacgtcgggttggctatggtctttcaatgtcgccccagccgcatagccatccctcgcttttcgttgatacgtcgagcggaataattgcgacgacaatgtctcgtagaagaccgagaggcagaggctctggtagaaggaagctggtgtggtttcttctagttggaatctgttgataaggaggacgttggttgatggacctccagaaagtcgagaggatcggggcatatcccgctcaattcgtcaacctctagcgcgccagatgcaactcgtacttgacaagcaacgagctacgtctagagatcatcaaatactactgtctgtctgcagacctttcatgctcgctcttgaaaggggctcaaaatctatctatccaggtccgtcatcgtggtactgatccgaccatgacgaccaacacaacaaccgcaggatctcagcggacagtctgtaagctcagggtgttgaaccgttaccgaccgtcgtcaccttccgactgattcgcacaacgttccccactgtagtacctaacactgcccgtctgatcgctttgatgttggctggacaaggcgtggaagatgcggacgaacgggtcttgcaccagctgatggacttttcacaccgtaagcccaacacacgcttcgcttcgtccgacgggtggaccccgaggagaactatcccacgaggctgatcgttgagctttacgcaggatacacgaccgaccttttgacggatgccaagacgtatgcgaaccatgctggacgtccaggggtggtagagactacggacgtggaattggctgtccagacgagaagcgggtacgagttcaccgaaggagcgcccaaagacgtgagttcacatcacatgttcactgacatccgaccgagactgactacaacgctcgtgtccctcgactgccagttcctactcccactcgccaaacaactcaaccgactccctcttcccaccttttctcaagcatacacccatatcctccttccgcccgctaatcagatgcttgggcacgtcaacttcaacctggtccccaaccgaaaccctggagtagcatctgaaggactgtacgaagcgttcgaggacgatgatgacgaggacggatggggtagcgaggatcagggttccgaggaggataccgaggagaccgtcaagccggggcaaggggctgggatgggcacgataggtgaggaagatggcgacgatgtggacgggatggatacggccgaggatgtcaagctcgagaacgggatcgaggagcgcggacaaaagaggtcaatagacgagaccgagtgatgaaggaaggttcgaggatcacatggtgaaggcttcatatggacggccagtgtaacaataatgtagcggcattgtatccctttatgatcacaccagctttacgtctcaaactgaccacctatcgaaacaagtgcgcatcgcacggactgtaagctgtaggctggatcgtacttcaacaagcaaactcttatgcgcagaaccttgtcttggtccagcgaatcacttgacgttatatatcgttcagatcgtgacacacgatgctcagattggccatcagtgaacggccgaagtctactttcaggaaagtgcaggaagaaagcaaaattggacttgagcctggtaaccaaaccagaacatgacttgcaggcaagtcagttattattcgtcaaagtaagcggcacaccagaaataaacgatagtcgtacaacggtccatcttcgacccacacacttagcccaaacgtttcgcctctctttccctctcctgccgattggcgacttcgcgccacaatgtcgtcaacaacgcaggcaccccttcctctgtcaaacggggtccaggtgggaaccgaacgggctgttccgggtacctcttgaccttttcctgttcgacggagtagtccccgcttgcaggtggagcgggagtcttctggacgggttcgtcgtttctatcatcgatcggtggtctcccagctacatcggcctggagctgagccctcgtaccttccctagcgttcagagccatctccctcgcctccctttccttgtccactgcttgtgcccgccttaaagcttgagccgcccggtaagccatgaggtgagccttgggatcattggcggacgaagccgacccgggggtccctgtccctggagtccgacgaggggcaaacgaatcccatagcgggtagagggagacgagctgttgcacgatcgagaggagcatgggcaggctgatgtctagggaggcgaaaagtcggggcgcgttggtccgggtcaagagcttgatgggttcaaagtctcccatcctgagcgcggggtccgtcccgctggtcaaggcaatcccgtgaccgtttcccgaggtggactgggtttgaccgtccgctccgacctgagtgttaggtttctgaatgtaatacacggggacctcgtctggcttctcatcccctattctgaagggcatcaagaccttgccgcggagacggtgcgaatcggccgaagacttgtcttctagtgaaaaggcgaggtacagagcggcgagggcgatcatataaggtgggtagaggagggacaggtgggtcttgtatgaatcattgatgatgaacctgtgcgacatgatcgtggccggtcgatcagcacgaatgcacgaacacggaaaagggggggaaaatagcgagtccgactgaccaagccatctggaacaccccgtcatcgacctgccaacttcccctgcctgatcctctcccccaaacccgggtgatccattcttgctcggtctctccttccctctgtcgacctcgtctcttttcgcgtcgtttcatccgcttgacgatatgactcgcaccgggatctgccctgttcgtcatagtatcagactcgatatcatcgagatgccccataccgacatcttcatcctcgcctaggtcgtcctcgtccgaccagtacccatcatccaagggttccctcccacacacgctcatcagcgtcgtatacggatgatagacgaccatgtcgaattcgagctcgttcaagaggtaaaactccatctctgccaacttggtataatccgtcgggagcggtctcggggaatgatccgagaggcacgctctggcttcgctgagaacgctcttgacgtggacggggcattcctcgactttggcagcgacgtacacgcaggcggtgaggaccaagaaggggtccgtctcggcgaacgcgttcttgctgtagaaccgcttaaagtagacgcatgcggtggcgatggctgattggcgcagtgagatcttgcgggagagtttgtggatgagggagctaaagtggatgtgaagggcgaggatgtccgagacggagaggttgtaggaagcatggtccggaagggtctcgaggaggtgatccagtgagggtagggggatcagccaggtgttgctgcggcatcgtgggacggacgcaagtctcttagtaccttccgaatggatttccaaagacgataccattgctcaccaatgtgtcgaagtccagaaatcgctgtgaaggaaagtgatccagcttatcaacaaccatgtcgaattgcgcggggtgttttcccgctcgagcgttgaccctcacctggccatgtttgcagcagcgtcgtgtctatccggtgccgcacactactcatgctgaactgggtctatcccaaggccatagcttgccggtcatccttcgatatggtgcaggtcatgacaagatgacagtgtttcgtggtcgtctccccctttttgtaccaagattcggatttacccgccgcgtcatcaagatgcgagcaagagcagaaccgagtagttccacatcatccatagatccatatcctctaccaccccgtatctgtacatgtctgtacactctaccgaccagctctgaaccccgttcatagaacagagcatcgagcgcggataaccggacctcaagattgacgaaccgaagagccgacagtgatgactagaggatagacacgactatcgacgactatcgcacgaacctgacgaatcacttcgaccatggacgaaccttcacaaaatatcgacgctcctactcagcaggcacaggatatctgcaggatccggttcctgtttgcatcgggggccgatgatcttaccagaacgttcgggcgtgatgctacggtagccgatgtcaagcagacgttgctcgatgatcagtcaaaggggaatcaagcccctcctggggatttaccgaggttggtctggggaggcaggatgttgagggacgaagaagtcttgagtgacgttctggtcagtcgtatgatatcctccactggtccttaggagctgaccctttgtgttacaggtcggcgacgagacagaacattccatcatcgtggcggggaaaccgacggactcgcagtcgcaagctcgaaagccagtagtctcgccacgacagtcggcccatgaatcactcacgactccttctgctcctatcggcacttccccctccgcccaacccacacccacgccaacccagacgcaggcgtccacagcaagctctccatcgacctccactcttctcccagggatgaccctatccagcttgatctctcaagtacaatcctccgctctgaaccctcaaccaaaattgacgcccaacccggggtacgtcgccgcgtacgaggccctcttctattattccttcctggctagcaacgccgtctacgcttttactggcgagcccgagttgtcctggtgggatttgagacccgccccgctcttccctgtggaaaaggtcagggaggctgcagaggccgtcttgaaggtcaacgggatccgacgggacgggacgatgggggaagaggtcgggtccgtgcagactccggatgacgaggcaaaggaggagcgagaaggggatgagctgttgagtgatagcgaaaggaagaaggacgcggagggagatgaatacatcgaggtcgaggtcaagtaagtaacatcgtttctcttgccgagaagggtcactaattcatttacccatgcgtttgttagcggtctaccatacaagttgatgattcccgactcgacccaaatcagttccgagcagaaacgagctcttggccggtacctcgccattcgacgcgtgatcaagacattgcaagagctactcgtcaccacacctctctacgcccccgtcgctccgatacgggcggtccggattaccagcccaacccctaccgccgcggcgggcaatcgatacgtgacctaccgtcggggctacttcatgttccggatccccgtgcccgatttcttcctcctcttcgccatctggacgtcagccttttggtcgttgatcaaggtcggcacggtcctctacatgttcacccgcgggatcccgcatgatgaccccaaattcatctgcttgacggctctggctatcggttggtggatctgggactgcagcacacatgtcaggagagtacgggcgagtcgacgaagagctcgggaggctgatagagcccgggcgagggcggcaagaggggtaccgccgggacgaggccgagcgcgggaagtcagaccggtcgctccagctgtccgagtcgttcgagctccaggtggcaatctcacgaccaggttgcggacgttttggaccaatatcggcatcgcctatgaccgtcgcatcttgcgactgttctactttacgccagacgcaaacaccgcacctctggaagtcagcgatcgaaggatcccaggcagcgatacgaacctccctcatccaccgagtccaccctcggctttctggagacttgtctgtctgccagtcatcctcttctttgtgacaatggtgccgatgctggacactggacgacgctccgtcattctcgaaagggaaagacatatgcgcctcctggtcgaaaagctgacccgcgaaaaggcggctcaggaagcgactgcagagaagaaaaggctcgaggctgaacgagaaaaactggaagcgagcaggcctgaagccgcgttcgtcgccggtccgtcaacagtccctctggattttttcagcgaggctgcttacagagcgtcccaggggaccggcccgtcgaaccaatcgtctgcgcccactgcggttgttccgggttcagcgacggaagaccacgaagccccgacccatgtgatctctcaaatcgctgagtctgctgcatccgggcaaccagaacagcctacttcaaccgttcctcgtgacgaacctgcctcgcaggaaaatccaccagccccatcccctatcatgcctcgctatctctgcccggaggcaatcgcttactatcgccgcatcattggttcgacagagcgtatcgactgggaggcggagcgacaagcgcaagcagcgttgctcgccaacaacggtggagccgaagcagctgccgatgtggccggcgacgacgacgtccccgttccacccgccctgtaacagtatgctgaaagaggacttatacatgagacgcgttgcatcgaggctcccgaagggaccaacgcagagcctctcccactactacagctcgtatcgcacgtctaccgagcaatttgtatcgagtaagacacatgaaatgacgatgcagatgagatttgatacaatgagctttgcttattttcttcagctcggtgtatactacgttttttgatggcaccacggatgcaagtcaagacggaggctacattggagagtcagggagacagtatggcaagcctgagatgtcgaattttggtatggcgtgcctggcacagtatcggccctagaaaagatcccggaatgaggctggaatttcagagcactgaggaacgccgagatcagcgatggtgttcggcaatcagccagacttcagtccagggtgtcgagcttaccttgaaacgataagcacactcggtgcttcgcaacatctcgacgtcgccaccggcagcctggatgaaattcaagacgatgctagaaggtgcgggtccgttgcggttacggtcgttcctgctgacgtccgcttggttcgcggcagaaacccgttgagcgtaaccttcgacgcttcgtggcaggtctagataaggttaagagtgagtaaaagcgggaggatgaccgtgccccctggttggatgctcaccgaagttgacgaccagaggtgccgcgacaacctctgggggcttgacgatcgtatcaaaggcgaccaggaatcgaggcccacggccgctctgggcggatgatctccatttagtatacaccgcttgcttggcctgcgaagacatgtcaggcgactgaaaagatcatgatcaggtttagcaaacagctctctatgcacgaacaaccaagtttggcctcaccagagaaaggttttccatttgtcggctgtttaacttgccaacaacagcatcaagggtgctctgagctccaacatggatgatcgcttgccaaaggggatactcgagcagcaggtctgccaatgcttccagtttgaattccttggcctggttgagctcgacgttctggttgccggccgcccttccagagccaatcgtaccgggtccagcggcagcagcttcgttccggctcgcggctcctcctgcgagggccaagtacaggtagtagtgacgcaagttaccagcggaggtcgactcatttgaagtgttggtgccaccttcgcggcgaactaggacccggactggttctcgaacttggatagattgggagaaattgatgacgtcggttggaatggtgttcgagctaatggcatgtcgttcttgtcagcaaagtcatacagtagcatgagcgggcgtcgtaactcacaaaatgcaggtctgtcgttcggggttattacccaacgccattgaagcgttgttgctgttgttattgctattggcgttgttgaagcgaccgttcgacgcgtttgggaacggcatggttgacgcggggttgaagggcgagctcatacccagatcgaaaggactggtgattccagggctttgcataggaccaggagtaccgataaccccattgataccggcggcagggtttcgcgatcgaggagcgggcaaaacccggcagatcgaagtcacattctcgtaaaggtttcgagcctggaaatgatgccggctcaatcttctgcattactgagcggaaaagagcaactcacgatcaattggtcgacctcgtccaactgcgaaaaacgtcgcaaagtaaatcccgagattcgaacgagagcgactgggaaagcgtggacttacgaccagcatgcgaacttcaccaccaggcaggccgccgttgctggcatgcttgaccatgacatcgttgagtcgagcaggcgtaccaacgagaacatggacggcattcctgtgccaattggcgaggtctgctgaaatgtcggcaccggaagcacctacagcgagaccagtcctgactccaagtggtgcaccgatatctcggatcactagatgtgggatgggaaagggtcaatttccagtctctactcaggattgattacatacgtacgcttatgggcctgagtggcctgatctacagtcgtagtgacgataatcgcgcacgggcctttgtaggtgggctgatgctgcacacccaagctgaggaccagctgtacaacgggaatgacactgtgcgttggaatgcaatcagcctggtgtcgatcaatacagcagtcagaagagagcgcactaagtgatgatccgctcttgggtcgggggcgcctgagcaatgatgtcagaacctctcaacatgaaaggaagggcgcgtgcttggattttgttgggtgggccgatactggagtatgagcacgaccaaaatgagctgattgttgagcgacgatgtacacgagatcaagactgacccatatttgacaatctgcctctgcaactccggcgtaagcggcagatgctcccatttagtaacggtcataccgcctggtccaccctcccttgacattccacctggagtgacggcatccagtctgtcacgctcgatacggccaccagcgccctggttgatcatgttcatgggtcccaagctcattccgctggcacctccgggagtaggcaacccgagtcgctcggatcctgcagcgatcgagctcatgttctgatagcccgggccgccagccgaattgacacccggtacaacgctactgctagtagctcgacctggatgaggcctcggcctcgatccgatcgatcccaaagcactggcgatcgagctgttcagcccaccagctggtccggtctggttacgagcattttgcggtcgtcccgagtttccacccattgagggaaagtagccctgttgctgatgcggggcaccctggcctggtgtctgcgcggtcgtctgactgccacctgctggtgcgttatgaccaggagaggtgctgctggtcccgctttgactcgcagaggggacggtcccggtcttttcgtcggggctgggcgctccactctggcccatcctcttctccatcccttgcctcaccgaagtgctctgcatcctctgtagttgcgcgacactagcactcagggctgcaatctgatgcgtgagcgcggcgacgtccgagctactgccactcgaacccgctgtcggcgtgatcgtcgaattcgactcgatggtcgcaccagtaagcactccggtagagatggtcgatggaggttcctcgatcggcgccgcagaactaggcgcgctcgtcctggtgatctgaggtggaccgaagggggaaggggtcgaaccgcccgaactcgaattggatcccgaatgcgagccaagaccgttggctcctgcgacggcggtaccgttctgcgtagcgctgatttgcaacgacttgacgatcgtgttcaggctggcgacttgttggctcatgtcggcgatggcggcctctgtccgagcgaccctggcgatcaggtcctgccgcagcgcgaaccgatcgagacgaatgagttaaacaactggatttcatgaatagacgtagccgacatcgtcactcacgatcaaagcctgcccctccatccttccagaagcgtccgtcacccctgcgacaccacctgctgcaacccctcccgtcgagcccttcccacccatagcgctcatcggcctgtccaagcccgctccagatcccaaagtcaaacccgatgcaccttgctgcgcttgtccgacacctgcggacgtcggcgcggtagcgaatcgactatgagtcctctccacccctggtcgacccccgacacctctagtcggagttcctcccaagctccctggaccctgaatctgagtggccgaggcgttgttgttgttgctactattgttgccctgtgcgttccagagtttccgaccgccttcgaacgcgttctccggcctgggggaacgacgggcgagcgaatcgaggtgggaagctccgagggtgagattcttgtcttcatcctgatcggtatcctcgtccgtctgactcgaggtggatgggaaacccgtctgatgcccaacgtgcccctcgatcattcctaccgagctcaaaccctgaccgacgctgtccacgctccctgcactaccgtacacgcgatcgctcgacctccctaataacgatggcgacgtagggatcctctggtgcgtctgcccgtacccttgatacccaggatcgatccctcccgggttgatctccaggaaccttccattcgggactcctgtctgccctgcccccgtgttcggaccaccgcccatgttcggggacctcgaacgctgaaccgcgagcccggtcgattgcccagggtctcccgctccgacgatggatggatgaggatgaccgccagccgcggccccagtggttcttcctccgacggcagcggacaggtaattgttgcctccctgcccgtacccggattgataaggtgggaatttcgcccgggtgggtgaaggtgaaaacgcttgtgtcgtttgaccaggagcagcgtacccgttcgcgtcgaacggtcccgacacgtttctattcgcaggtttctcgggtgtaccgtaaaaggctccctgcatgttgttggaggaggagatggtagggttcccggcaaatggcgagttggacgtgttgggaggtacgggaccgtctgaccagatggaggagagtggtcgcgagggcaccgaggtcggggcaggcgagcccgacgctttggccatgttactgctgaaagccggagcgttcctcgaaaaagtactcgacagcttgttctccccgttgttcccaccactaccgggatgttgggtgtgatgagcggtcgattgcgaatccgacgcggtcgggtccgtagacgtggtcgtcatggtcgctctgaagcgtgtcttgctcgcgaaaagcgagcgaggtcaaaggggggacccgggggatttgaagagatcagggtcgagattttgctatagatgagtatgacagccccgagtgtgattggctacaagacgagcgagcgaatcgtcgacggtgctctccagacacagagagcaaagtgtatgtatgtctcgagttgcgtaccggctccctcgacttttcttaccgagagcgagtcgagtcccgagcgagcgagcgtcaacacggtgtgggccacgcgcgcagagggtgttgttagggacaaccatcccgcacagaccaccgggaggcgccaacgggccgcatgggtcggggtcactcgccgttctgtcataggacagcagcacaacgccagctcgaattccagaccatccaattccctgacgaatgcccagatcccgagctttcgccgtcgatgacattgcaagacgcaacggtttggtggtgataacttgcaaattgcgcgtaccgaaaagggaaatgggtacgacaaagggatcaaatctcagggacagaagaacctaatcaaccgaaataccacgatcatcagatcagatcagatcagatcagatcaaatgatacacatcacgaaatcgaacgaccatgcctatagcttggaaggccagcctgaaagcaagacagacggtgcagcatcgggaacaaacgagggactcattcgcagcgcgaacgagatcatcgtctgtcacgctccataacggcgatcaagatctcgcgacgtcccgtaattccgggctacctttagcatcacggaagtttggctgatcacaaatccagacttgttcgtaaatggcgcagtctcgtacactgcgcattagggcaagatagcgagctgtcgaccgagcgcccagaacctgccacccgtacccggttgctgccagtttgaatccgcagctgatcgacgtgtctatcctcctcgcaaaaactctattcctctcgcgtacgaaaaatcctcccgtgccggccgggacctcctcacgacctctccctaatcaccatctgacctcgtagctcccgctcttgacaaacgtccgcacgcccttgaaaggcttgtacgcggtctcgttgacgaccttgatatggtccactttgagtccgctgaggatatgctggttgatctgaaagttgacctggaacgcgggttccgggcatggcctctcctcggaactgtattgttatggtgaaggcaagacagggggtcagtgtagccatctcagtaagcagaggtgatggggctgacctgcagacgaaactcccgaccaagctcgcggctttttcgttcgcggtcaacgctccgatcatccatcgcagcaaccccttgttcgggtcgaaatcccaacttccaccacccagagctcccacgggatagtttgggttctttcctccacctgggaggatacctcgggtatcgcctgaagccgttgcagagactgaagtgacatctgatccaagctggatgctgatgacaacattctcgagcggtctgccgtgcgtattcgaggagagggtcaaagtgaatttgcctggtccattgtctactagtcagcttgccatatcccgacagtcttacgaacggtactcaaaacgtaccgcctccgacttctgtcgacatctttgccttgaggttcaatggcagtccgatcggccggagggctcccgtcggcgttgctacctcgtactccagcagcttgaattcgccgtccgggggtatgaacgataagactccgttgtccatccaacgtttatagctgtgatggaaggcgcgtctttgaatgagcctgcgccgttttggacatgtcgcagtcatgcttaccgtatgcagggatggaaggcacagttatctataaccttggggtttgtgaaagatagcacaaggtcggggttgcctggattcgcggagtgacggagttcaattcttcgacccatatcaggggactattcacatctgacagactgacctgtcaactttgcgttgcaattcactcgtccccaaacatccacgcttagagcctttccacgtctaaaggccacgatcagctcgcagaaggttcaggacgagccagtctctcttacttgtcgattatcgcgtctattcgctcttcgaaatcaaaatatatctcattgttggaataccgagcgttcggccggcgccatggtataggtgccgagtatggagggttcgtctggcttagggaactgttcgaggtatgttagtcccgagaagtatctcgcagtcgccagtcggcacccttaacacttaccccgacaccccggctgcagcgagcaacttccgcactaatgtaggtggcagcacgatatccttcagcatgttcgtctccattgtcaacggatgaccttcgtctagcatctcctcgatgagcttgggtacatagtcggtcagccttggtcacatactggctttgattactcaaaaactcaccatgtagactgtgtcaaagttctctcggatcgtatgctcagtcacctcgccaagatacgactccaacgtttcgagaaacgagtagatgaaggagaagggcaacatcggattcacttgaacaggcagcacattagctcctccctgaagggacaccacacccattccggtcgaccgcttactttcatgactgacaggtaccagtatccgcattccttctttttccacattgaaacatgccgtgttgagccatgctccttcttcgtattgacttgtgtttggaaccgagacccataagatgggatctagctcttgagcggtactagttgatgcgacgtcgatacccggccgcgacttggccagagcctggttgaaggcgtcgatgtgtagcaagggatacgaaggaggatgagctcgaaagtgggaggatacgatggatcggctttactcgtcatatcatatcatttcagcggactgttcgacgaaactgatcacctcggagctcaccctgtcgaatccagtatgattataccatctagcggagccatttcgaagcgactgtgatgatacggcaagaatgataaggaatgagcagctctctcaattctcggcaccttgactttgccaatgaaggtcaaagcgaggatgtcaagctggaagtcgttgccgaccgatatgccgacaagctgaacggaagcaaaaagtaggataattcgtcgatcgtcatcattctatgtcattcaggcgctgaagatatgctacaagagacgcgctcatgaatggtccagataggacctacggggtacaatgtcgtaacttgcttcgttataggctgtttcggtcgtcattgtgccccgtattcgcgcctgtggctgcgaaaggggttctgtgacatgtcgttcagatacgtgccgagctgattaagactcgggtcgcatcggcgttggtggtggtcgcacggctcatctcccgccgtttacttcgtatgtcgttaattttgtcccggtcagaactctgagcttgctttgctcgatcatgacgtggcggatagcttcagtcgatgccttggctaccatgtacggttgctcgtttctctgaagcattcgcaagtcccacattctaacggtaccgtctgcgtaccctcgagcgaaataattgccgttgaaagatcccttttcgaaacggctcaaacctggtgtcttgctctcgatcagattgatgtcgtagccgaacctcttgataggttgccgacgtctgatatcgaacatgtagacttgatcgcgagtctgctccgcctcgactgcgattgtttggggagcttgctcgttcgtgtgtatgtgccagattgacgctccgacgtcgaaacggtgatgtagaatcttttgcgcagaagcattgcaatcgtagacgagtacttcagcacccgtagacccggtcaggagccaacccttctccttttcgaacaccatacttcgaatgaacgacgtgtgtgctttgtgcaaaagcatcgtcgtggagaccagcgggctatcacgagacccgacggtccaaagcgagaccttgtgatcaagtccgccgcttgcaaacaaatactcgccgctgccgctgatgtctggcccgatcgagctcacgcaataaagcgttccaggagttccggagcggtggaccggagccaggaagcggtaggtagcgcgcggctcggtgtcggcgttcaggcagaggatttgttgctggctcgtcttcggagctgatgggcctctctcaatggccatgacaatcttgctctgggtaggcatacacccatcgacgactttgagcccgctctcgagagtggtcgtggccgtgtttttgtcccttccagagaagaattggacagtgccacgcatggaataggtggcgatgtcctcgtcgttcttgagcataaagcggaccttgtcaccagcgggtcgatgcacagatcgtgctatgcttcgctgaagcttgaggtcagtcggctcggtatgagctttgctgggcgtactctggattgcaatcagatcgaccgcaggagcgtccgcgatttgaatcgtggtcgaagagctggatgcggctgtagcgtcagcagaacgtcttgagttgggtgggtgcgagatgtcgcgacgtgcagtagcgattacgggccgtttcctcagttcgagaagctggagatgtaaagcaactatctcgtcttcaatctccgccaacttggcgattggacctgtcttgttctgggcgacgtccttgatcgattgccaagtcgcctgagattggacggctgtttccaagcgagcctcaatctcttgaaccattgcgccatcgacttcggacggcgattctctctcttcgctctggatcacgttgcgagcagcccgcctcggcctcgggacatatcttccttcatcgctgtcatccgtggacgtgtcgctatcgctgctgatgataacatgatgcaccggacttcgtgaacggactgtgacaacgccgtgagacgtccctgatgcaccttcactaaggaggcggcggaccggcgcgtctggtcgtggctcggctgcttgtacgatcggtgggaccgcgcagttaggcggtgtcgattccgcacgaggaccggatctggtttcttcactggttcgttgctttccgctttttcgagtaggtagaggtgatggtgagcgggtgcgctttccaagcacagtgacgggctctgcggactctgtaatagcttcctctgcttcatcgactcggtccggcttccgttgccagaacaatatcagcttgaaaggcgttcgacggacttctttgcggacacgagcgggattcaagtcgacccatagttccagctgcctttcctcccaggccaccctcctgatagccactgcagtttcgtcctccgaggatcgattcgcagcacgaagcgcgtctgggtacggaaagctgatcgagcccgcctcccgattcaagacccaatcgacagcatacccgtcgtcacgccagatggagcctgtgatctgacgcgactttttagacagctcagcctcggccatcgcccgggccttgtcgcgagcgagtgttttctttctcgggtctgaagaccagcaatctttgagatcggggcgactccttttgctgttcacgagtccagggtcattagcggtagaccccatatttctccttgtttcgaggcgactcacagcatcaccagcgtggaactctgcttgttgtcatcatcttgccgttgacgcgcgagctcctctggagactcctcttcctcctcttcttcggactcttcttccgatagctcccgccccaggatcgatgagcctggctcggtcttgacttggcttgtgtagtcgatgataggtttcgtgttacgggaggactctatatcaggttctacctgctctgctcgccctgcgggagatgaccgagaagatgtgccggtcatcggttggacacgctgctgcataagttcatcttccgagctagaagattcgcttgacatgtgggatggcccggcttgaggggtaggtaagcgcatgggagactcctcctccgtcaaaggcatggctggctcagatggggaataagcattgtccccgcggatgatcaaggcgggaccagaggaagcgcgagcttgcgtagttccgctgggttcacttcgaacggttggaggaataggtgctggtagagcaggtcgagcggcagaaggcgtcctggtcgtctttccagttgcaaggtttggcgtgaatttgcgcggttgagtcggtacagatgcaggcaccggtgcagtcgaagttgcatgtgtaggtgcagtcgcaggcacgggtatagatctcaatgcaggtggaagggctgacctctctggctgggggcttccttggccattcggagccgtttgagcgcgacggtcagtgagctcctggctcgagctggacggcgaattgggcgggttctgttcaacttgtcgattgatccggccctgcatcactcttgcataggcacccatagactgataaggtcgaggtgctggaggcgtgggttcggaatcgttggaggcaggaacttggttgggtggtctttcggtggacccattggtgttgcaagtaagggacgaagtcgggttcgggaaagtttggcgtggaacgacaggtttacgatctgtgcgagcatcgtggagggaaggtcgttgcgccggagctcgaggtagtccagatgaggtcccgctgctgctactgctgctagcaagacgaccttggctgacaacttcgggacgagtgagaagtgagtgtccaacggagggcccgttcctgccaggaccagcagccgccccacgggaagctgtggatgccccccgtccatgcaatcccccacgaagaaattgtggtagatccccgtcaggtaaagagcgaccatttcccagcggaatatcgtttcctccacttgtggcgactcggcctcgaccatgccctcctgtcgttcctcttatacctctcgttcctctagctcctcttgcgcctctcgctcctcttccacctcttccacctctggcaatgcctcgtccacgttcactcgagctcggcggtgggggcgaccgttccaccctcaattgaggtggagcgtcagtcatatccagacgatatcgctgaacctcgtcgatcgtctcgtcttccatcctcccctgacccggacctcttcccatcagcttgcctggatgagcgatgcgaagaggtctaggctcgcgggtgtccaacagcgcacccttctggcgtttcctgaaatcaatcgtcgacatcttgaggttcgtcgaaatcgatcgaatgtgattggaataggctatcagtacgattgatgacctcgtctcctgtcattggacgagctggttcgagactccgttacagagatctcgactagactcgacctgagcgcttctcgcttctcgcttctccctcaaaagaggtcgtaacgatatcgttgcaagagccgcaacgaagtgaagaaggcgccgagctctttcgcagtgggttgtttgataagacgattcaaatgtttgatacgacatcgaatctgatgagatcaaacgaacttggcttcttggttgctacagttgaacgaaccgtgatggcgcggatccgatttcacgtgacgtgatctgtcccgcaggtccagtcgagctgattagatcgtcgagacttgtcaaaatgttcagaaacacaagacgacaatgagtgaagcgaacacgagcaagctgaacagttttggggaaatgggtttcaggttgatcgtggcaaatctctctaatacatcttggcataagcctgtcgagaggccgtacgattggcagacaacccgggcgaagccgatcgggctccacccatctgctcatgcatggcctgcaacagcctagcgttcggggtgatgttatcctggaagttctgttgttgttgttgttgttgttgttgctgctgctgcggttgttgaggttgaggttgctgctgttgttggtgctgttggtatggggagatgccggcgttcatgtcgtacaggtgcgcttgaggttcgttcatgaatcggttctgagcagcggggaaattgtgcggtgccatgcgcaagatggcggggtcctggaaggggaaggtttctatcgagaggagaggtcgattcggtgagttgccgatatgaacgaaaccttcacatgcaagacctaccgttcgcgttgtaaccctctcgagggaaccgggcggtcccgcttccccctctcaaggcctgctgcagaccgggactggcggtccttcgaccgtcagcctggaactggtgctggtacccgtgcatgctggccatcatctgttgctccatcgcttgctgcatgttcctgttggcgttgacgccctgctgctgttgttgctgctgctgctgctggtaagccgggaaagtcgacgtgttgacgggtccaccgagtcccggtggagggggcggcatcgacccgccggccgagggcgctcgctcctggtgcgtacccgcgggactcgacgtctgcatcgggtacggcatggccgacttggaggacggggtcatttcgttgtcaacccgcgacgccgaggtcccggggagaccggcgaaataattgggattgctgaggttctcctgtggccgccctgctgctgctgctgatgccatgtccaactgtgcaaacgctcgcacgtcgggcatgatccgactcgacgagggggccatcaacgacgacaaggtcgacatggccgtctcgggcgggccggatcggttggcaaacccaaacctcgagcccttcttcttcgactcgtcctcggcaccgtttgacaatgttctggtcattggtataccgccgaaatcgtccaatggtggatccaagaacggatcaaagacgccatcatacgacgagggaccggcgatggcggcctctgccttgcccatagccaagatatcctcgaccccggccaacaggttctccaacttgccctcttcgacctcgagcttgacgtccagtcgataggtaaagtcgccatcggcgaaacactccataaagtcgtcaaagtcggggtaaggtgattggatctggtacaccggcgcctgcccttctcgtcgagataggacctcgtcgacgacggcctgggcctggaccgatggttgataagccgggttagcctcgcgcatgggcggtgaagctggcgaaggggaagtcgctggcgaagcactgtccgcacgtccaccttgaacgggcgtcgactcggtctccatgggcgcgtgcttgacctgttcatcttcgaccttgtcgccattgtcggcagtcgtcgtcgatacgggcacgggtgtggcggtaccgttcgacccgatctgatctggtgacgccgacctctctggctcggattcttccggcaacgtctgcttgttgctcgtcgacacgggcgaatcggtcactacggacggcgtcgcagaagacaccgcctttgtggtcgtcgtcgtcgtcgatgtcgacctggacaagacggtcatgctcgatcgacctgcctcggagacgttcctcgacctgacctctgctggcgaggacgacgcggcgggtgtcaaggtcgacgacgccgcggatgatgatcctgccggcgtggctgctacagccgccttggccgatctcgaagctgccaacactgatgccgaaggggtcgcaaaaggcgtcttgaccttgacaacgggtgaagccgtggccgaccctgtcgacccagccgaggtcgccgagggcgctggcaatgtcgtcaatgtcggtttcgacaagctcgacaggctcaacaccttggccttgcgcttgatcggtggttgaacgggtggagctggcggtctcgtcgcccaatgtgccgtccttgggagggctgacgagtcgatcccctcgtctggcgtcttggcctgttttgagatgggttgtacggtcgacgccttgggtccccccgagctgctgaccgtccgttcccggctctgcaactgtaagtccatcgtcgtccctgtatccttgatcgtatgttgcctgcgaggttggccggtcggttcggcatcatcagcctcggaccctctcgcgcgcacgtcaatcgcccccgtggtcgtcaactccgacactcacatggtggtcatatcccccctggtaaaggtatccccctcccctgcccactcgtgcatccccatgcaagccgacccatcctcgcacttgacccctctcaaccagctgagacaatactttgtgctcccataactcgccttcaacgtcctccccggattactaggcgccgggtacccatccaacgccgagatggccctcgcggcgtcttcccgtcggatgtacgtgatgtagatccctaggtcggaatcgtcacccgaagcgaccgagttgagcgagttggccgaggggtccgaggtggacgagcctttccggagaaagatcttggagatcttgccgtactgcccgaaataatcgtttgaccggaggagcgagaggaactacgaaggccgcacgagccgtgcgttcagcgatgtgacatgggcccgtcgccgcgctctctgaaatcgcttcaagggactcacctcttccttgtccccgctcgtcatcctcatcccggtgacgtagaccatatccttcctcacgatcctcacgtctctcaaatgtctcctcccgagggcttccaactgcttgttagccttttgcttgagcgccttggcctgttgcaatcgtttcatcctacgagagtcggggcatgaacggtgaggtataggtcagctcgaggacgatgccggggtaaatcaaacccaacccccgagggagagaagcgtatgcgccggacccactcttccggatccacgggctggaactgaatttcctgatcctcgtaccgtctccgacaagccgggcacaacccgttcagatcgtggatgatctgatgatgacagaatcgacagatctgttgcctcacacgtggagcacaatacacccatcacacatcggaacgcaagagacgagatcagctctcgccgtccgggttgtctacgagacagagactggcggccaaagggggtcgaaagggggggcgaggaaaacccccctcccccccccccccccccttctctaccagtacaaccgagtgaccaaatccacttcagacgactatgtcgctcaagacgaccaccctccgagcaaactttatcaaccagcgttcgaccgcgcacgtccgttcccggataggcaacgcacgacgaccgtattcgccgcaatcgagcgcgaatggcaacgtcctcggggccggtcccggagccggagggatcgggacaggcgggacagttgggtctagtgggggggtaggtctaggtacggcgggtgctgcgggggcggcagggaaaaaggcggcacctagtaaacatatcgtctggtacagggaggtgagtcgaggagtgggatcctattcaaagtcttcagtcacaagggatagtcggctgatctcgtattgggattcttttttcgtcgaaccagattgtgccaggtaagacttgatcttcccgatcgcgagcatatcgtattcgtggaccgtatactgagatcgtatcgctactccttggtgacatagctatgatgcccgtcatcggaatcggcactgccatcttctttgtcagtaccccttcccccgaatctcgtccgcgaacacccactcacaatgaaaaatactttccgcttacatcccccctcctcgctctcggctctacaggctctccaactcatccagacccacctctcccactctcgatccctacacgacgctcagatccgaatcactcatctcgaatccgagctcgcccacttgcagaccatccagcgaaagcaggctgcgagctggggggacagtctggggagggtcatcaagcatgtacagaaggccgccgtagggcctaccaaccccaacgccgagtccaactcgacgtcgaccccagccttgagctcgggcatggtctccacctcgacatcgacatcgacaccgagcacgaccgatactatcactccactcaccggcacttccaagccgctggtcgagcagctcgaccaagccaaacggagcgcgaaggaagggttgggcaaggtagaggctgggatggagtcgctagtagatcgggtcaaggacgagtttggcgtagtagtacaggacgagaacaagaagaagggcaaggggtggagaggatgggtcgggctctgagattgggtctgagaagcttgaacggtggggatcgatgtgagtttccggtgggtggtttaggaataaacagggctgaacgcgtcgtctcgctgtcatctagattcgaccctgaccagctatgcaaacccaatcgtcaccttcccttccctcacgccaatatcctctaatacctgcctcgtataatccagtcccccttcgcttacgaaatctactttacctcctctcggtcgatctaccttccataccgggcaggaaatctccctgatcccaaacccgatccccacctttgctgcgatcgactgcccccgcgaggacgagctcgtccggattgccacctgtatcgtttatgcgtatgcccatgccatgatttatgatcgttacgatcgtcgaggatctgatgtcttttcgggtcgaagcggaatgagctaaagtgccgacgagtcgggactgcttggacggcaggggggaaatactctgctaaagcgattaaggtgatcaggctgcaagtggactgttgcggatcgtaatatgcagacgagtgagacgttgcgtcgacaagtaatcgaacgacttggagacgagggttgaagtagatcggctgggaacatcgatcggcagttctcttcagcattgcaaagcgaggttccctatgagcgctgaaatcttgaatgtgctgatgcatggaccgtcgtatggcagccaagaccccgctgcctccgaatcgttccgctagtccggccggcctaatcaaaccggtggaaaagctcgtctcgccagaggactcggagatgaagacgagatgtccgtttcgattagacgccaacagaattggaccagagagcggtgttcaaatgccgctcgatcggtcattctcgcaagcttggtgatcgggtcacgtcatgacaatcgaccggtcctgcctctttcgtcggctacaacctcttcttcagcatccaggtcttcctctagatcgttcagcccaaacacaggaccgaaccctcttcgaccttcttcggcctccatttccacctgattttcagactctagtttggtctttccctccgtttggacaaagctttttgtaccatgaagccagtaatgtggatatcgtctccgtccgacgttctgtgcgaggattgcaggacgatcgaggcgtgagaaccggacttggcggtgatcgatcgtgttcgactcacgtttatgacaagggcccatccgatcatgacgagcgaggtgatagccacgacatagatataccgccaggataacaagacgactgaaggttgtatcgaagctatcaaagccgttgctccgccgctagaatacgcaatgtcagctcatgtcgacgattggcatggatcgcatcgcatatccgactcacggaggatgagtcgtgccggtgatctgcatggccaagaaggccaatccaaacgagaccgccgcagatacccagaccggccttccgagctcacccgtccgagtcgtgtcttccagcacatatgctgatgacagtcggaacagcttggtcacacagaccccaatgatggcgctaatgacctgtccgccgaggacgtgtcgtggttgtgcaagaggtgattcgatcgttccgaaacatagtacggcgccggcgccgaaagacgcgatgatcaagggagttccggaatccacaaagatggtcgtcgacatgacaatttcgataagcatgatagccacaatgccacccaaagtcgagaggagccagacttcatacttgagtggtatgtgcctgagccaagagaacggcgggaacggaagaggcgcataaggcggattgtgagatggcgaccggtagcctgtgaaccgttgcaagaacgacggtaaacgggtgcgaacgtccctacgaaaggtgatcttgagagctgccgcttcatctcgtttgatcggggtcggagaagacgatgttacggaagacctctgaaatcgagagatcaacctcgtctgtgatgtggcccgagttgtgctgctgtcccgaaccgtcgaagacgatctacgttggaagcgatctcgtgaagtcgagtcggaacgttccgagaacgataatttagcttgccgttgctgcgcagccaagggcggcgtgaccacggccggcggtgacattgatgtctagtctgtccatgtatcccgacctcagggagtgccgactcggcgcaattgtagaaagatacagtagacctagacctgtggataccgactggtcggagcggtttgacttgggatcgatgattaaatgactcaatcgcaggtacagagcatgacgtcctgcttaatcgccgagtctcggccgaaaacgccgccaaagggacccgcacgggaaaaaagcagcaaaaaaaatcaagctctctgcctgggaatcgaacccagcgcgggcgcgagtagtgttgatagttgatatcatgacaagcgccaatgttaccaatacaccagcaaagatgccatgttacctttgtcagcataatcaaaatgaagattcgtttctctaccccaaactactgcgcaagtcatttcgattccctgacaaggatctgcgctccgacatggtattcacggccagcttcctctttgcatgatcgtcacctttccccttaccagcgtggcatcactcaacaatcagctccgtgaaggatgaacgaggactttggcagtgacgtactcttcgacaactgacttcccgcacgaaggttctgtaaagcgtctagtggcgcagaagcggacccacgggcaaaggccggtcccgatcttcgatcatctcccaaacggatccacctgcagacgacaaggtccaaatcctcacatcgttcaaagattcgaaggagcactggtcaaacgagtccaatcacactgtacgcgcttcggtgctattgagatcgcatctcgcagactcattgatattcgacggttctaaacgatgtacacttcattgttcgagtcactttcacgacgatcgattcgcttccacattagtcatgctgatatgaccaggcttagtaggccatgcccatgaagctcttgcccttgtcggcgggctggaagtcggcactcttgccgaccaagtgagcggtcttggccttttcctggacagtgtccatgttggccttcttgtcatccggcaagagttcgttaatgctagtagcatacgaagggtgaatggcgtattgctgcaagacgaaggaacggcacgagatcagcgctcgagtatctgcagcaaaggcgcaatcgggctcacctgagccaagtagccttcgatgacgatgtcatcggcaaacttgagcaatcgagcagtgttgctgtgcaagttgttcctctcctgctcgctcaaacggttaaggtagagctctcgaacctgagtgtactcgcgctcggtacattcgtccctccagtacgactttcgcgagacgacattgttggcgacctggtaaggcgcctcgacggcgttcatgccggcgaatcccggggtcgacttggtcgagggcacgttcttgtggtaagagttggggaaatacatgggcttgcttccagagtcggcctgcgaagaatcgtcgttcgcgtagtcagtggcacgaaatcgctcaacgaacgacatgcctactcacgtcgaccctcatggtacccataaagttgtccggcgagacaaacttggccatgaacgggcagttgacgggaatttggtgaatgttggcgcctcccagcctggtgtactgggcatcacggtagctacgtggcacaacgtcaaacgttagcatcatgacgattgatcgtggctataccaagtccgcctggcgactcacaagaaggcacgccactgcaacaaggtgtcaggagagagctcaataccggggactaaagatccgggggagaaggcggcttgctcgacatccctatggtagtctacaatccgagtatccgactgtcaataccggtcgcgggacgatgaaaccgagatgtggactcaccttcggggttcctgttaagggtcaagactccgacctcctgcatagggaattgaccacggggccagatcttggctaagggatgacaaggtcgacaagctcatcagcaacctcatagcattctcaaggaagcacatctcttactcactaacgtcaaacggatcaaagtcgacctgagtggcctcctcgggagtcatggtctacgcatcatccagttcgatcagcgcgccgcgattaccgatgcatatcgccatcgcgagcgactcacctggaccttcatggtccacttgacgttcccacccttggcgatggtctcgtacaagtccctcttggcgtaatcgggatcctcaccgcaggtgatggtagcctcgttcatgttaaaggtcttgacagggtgatgagcgatccagtggtactacgaaaccaggggcgtagggttagcgcgagacgaaccgataggtcacatgagtgggtgggggcttaccttgataaaagtgctcttgccctcggcgttgacccatcggaactacgcgaacgggaccggcagatatcagcacatgttccactcgacgctacaatacgagcaaccgctcagacccacggtgtgtgctccgtaagcgttaaagtggtgcgagaccggagtagcgtggtcagagaacaacatcaacccggcgtgctgggactcgggcacgttggcgaggaagtcgaaccacccgttgtagttgagcaagaaagacttgggttctcgctgttgagatcgaatgttgtcgggtccctggaaggggtctcgctgcggatcaaggggtgggtatggcgatcagcgtggggtccgactcgacaccttctgaggctggcgaccgacttacgacgaaaaagacggggaagttcaaaccgaccaagtcgtagtttccgtcctcggtgtagaacttggtagctgcgagatccccaacattgcggtcaggccgattccaccgtccgaatcaacgcttctgaagcttaccgtgtcctcgagggtttcgagcgctgtccgggtactctcgctgatgacgaccataaaacccatcagccccgctcatcgccacccctgcagaacccggctcttggagtcaaacccgcttaccccgtaggtgaccgtgctcaacctcgtataactcggcgtcttctttccgaccgcgctgaacatcttggccttggtcaaatgggtcacgtcggcggtgacttcaaactctccaaaggcggcccaaccgcaagggtggacgatacgttcttggatcttgctacggtcaaaggcttgttgtttctcgaggagggcggtatcggcttggactgtgcgcgaagggggggattatgggttagaggacagctacggacaggctgaggagggtaggtgggtgggtagggagagcgtaccactggaaatttgatggtggtcgtcagcatgactgccacccaagatcgagcgcggcgatgttcgagactcacggaattccaccgacgttcaaggggtaccccgagtggtgcaacctgggtcatgtccgggcttggtctcagtatctagagacgattgtacggaaggccatgtggatgaaaactcacggttgaccaaagttggtagtgtaaatgacggacgtccaagccaagcaatcacccgaccgatcagtcaacccgacattgacgaaacgagagctctttttcgagccgacgtcggtactcacactggcgagtcgtcgaaagcgtggctgccctggaccatccccgtcaacctagcggcggtctctgcaggaccgtcgttcagcccttgaaaggcctgggcacgctgggccatcctagggtcgacgccggggacgtgtttgagggtatcggcgatgaactgggccattgtcgagaagtgatcgagggatatgtggtggtcggtagataagagatcgttcggtcagaagatgaacgaagcaaagatgtgggagcggaggaacaggacgatgcccagggggagaggcgatcgaacacgggaaagcctggatgtgttatatatgtgtcgctgacgtgacattgtcaattcgagaatgcacactcgatcaggtcatcatcgtcgatgctctcgcctcgccactttgccccgtccaatgaggatcgagtcgttccgtcatcgtcatcaccttggatcgtcgtggtcgtcgttccaatacccgatgatggtaacgccccaggtcaaagggggagtgagacgggggttgatgaacagcaggacaaagagctaaagggggaaacgtgtctatcgaggctgatgctacacatggttgctgctactgtcccgctgctgaccacgaccggcgacgaaaagagggcgtgccatcgtcgaactgatcatacatgttccacatacgttaccctcggctttcgtcagcattcccgtccttctccacgcccctgacggccccccattccttccgctggaatccaaaaggcagagcgggacacgaaacacgttagcgcacgaatccaccccgggaaaaaggatgggtgacgacgatgatgcatgaggcgcggcgtgtcacgtgcacttttcccggtaacctttgcctgcctctcgcgaagggtggaggtcccggtcatccggttgtatctgtgatgacctgaccgagaaatgatggaggttgaaacgcgtttcggtgtggtcatcgcagagatgtattacggaccgatagcgagctcattcgtctctccacatgatgctcgaaggcagcaacggtgaccagcagcaaataactggcgcacccatcccggtaatggcaggtactgggatgatctgccagacgagagaaaatgtgtgcacaatcgagccacacttgtcaacctcatactcggtcgattgtccttctctcctgtaacgaccagctgagacctcatgtaatagtatcactgcacatcgcgcgggagacgcaggaaagtgtctttgagctttccttttcgaagacggataaagacgtttccacgatcatgactctttggacaagccggcgcatcaccctgcctacgagcgcgccgcaattcaggcgtcaattgatcgattcggagctcgatactcaactcagacgggctacgtttcggaaggatggcacatcatcgcaagacatcgtgttgaccatcagccggtctagatgacagaccgacttgcacgtgtacaagcttttcatcgtcgccaccaccactacttgtatattgtacttcgctactagcatatcgtggttcgccagtaacatcccccccccgagggccgtcgcaccggctactactcttcgcccttgacaatctcgctctctttcctcgaagcgtacccagtccagctctatcacgaccccacgcgccccgaacgaaaacccagaacatcccatcaaccccatcctcacccgtgtacgagcgtccggtacactactgctcttccgactcacctcgtcgtagatccccaccctcatcccctcgtcccgctcttcagcggcagccaagaccctcatcccccacgcgccgacgcaagcggtcatccccgacccgcaactccagatgacccccttgttgcccctcttgatcgattcccagcggacctgtgcgtcctttggggattcgccggggaaggcgatcgagtggaggatgacgttccggagttccggggcggggaggtaagaggagtacggtcgatcggcggtggaagggcggagtagggtgttgaacggtaaagacagggaatgggggatatgtcccgaggatagtccagcacgtggttcaggtgcagagcctgtccacctgcgatgatgatctggttcgtcgttttcgcctcgatcggtcgatatacgagccgcctactcacctttctcggctacgtgcgtccaggagcaagtgggaatccgagccctttccgtcctttttcgagttgcctaccacgtcctcgtaacctgggggtcacgatccgatccgatcggcgggcgatgtcgttcgggtcagctcttcatcggtatgagagagggctaattcagggtgaaatcatccgctcactcgaaatccgagccgtctggaaggaaggcaccgggtactcgctctcctatcacgcgccaccctgatcaacttcgagttcgtcgggacgcgcctccccgaccgacactcacccgtacgtctcctgcggtcaacacctctccctcctgtggtccagacgagaggtccgtattgtccacttcatacccctcgtgcatccatcgagcgatgcctccgtcgaggatggagaccttttcatggcccatcgactgttacgatcgggggacgtcaaggggatggatcagtcgctgtggacccgaccgaggtgttccggaccgcctgtatggcaagaacagtccgaggcaaacgcggcgacccacatcgaacgtgaaggcggctctgggcgcgctgaatatcccgaccgtatcgtagaggacgacgtgatccgtcttcctgatccctctcttcctgcacgcttcagagaacgtttcgggggagggcatcatatgtcccaatccgagtgggttaggcggggtgcttgttgaagtcgggatcgacgatgacgaggacgagtcggacttgggtgtactgatggtatcgacatcccatcgaatggcagaagggatccggggacctttgagaaattccttggatgcagagcgtggggagttgggcatgtgccaagatgcatcgatgatcttggtgctggcctgagcgtgccggacgacgtcaagtcaggatcatacaaggaaacaaagatcaaccatcgtccctcgtcggttcgcgtgtaggcgcaaacaaacgagagactgatcgactgaccttgggcaacgccgatagttgtttgggcgtgatcaagagtggcacgcgggtcatgctcgaggtcgcgaacgatcgagattgtcgggcagtcaatgtagaggtcgatatcaaagactgggtgagcatgttcaaagattgattagatggtgttgatacggaggacgaccacaacagtagtagtaggtagtacctgggtgagcagatctacaagtcagagtacagagtagtgctgctgttgcgagctgtgtttttcggctttgagcgacgggggatggttcgagattacgatgatgacgagatgacgacgcgaggattcggtcgatcagaggggaacggacatctccatgttttctacgcgcatcatccaattcagaaaacagtgtaatgtccgtctttctcgtcaactgcgattacttgctaccagtggttcagcagggccctaaccaaaagctcaatcacccacaaccacaccatctaaacctcgtcaacagctcgttcaatcacccacttgaactcgtctgacacaccttgccactcgatctcgaagacataatatcagataccaccatgagctatctcacgacagtcgcacctatacctacggcgacggcgtcatcatcatcgtcgtcatcctctaccgccatgaccgccgcttcccggacgggccctatcgacccttgtcgactgttcatcggtaacctctccccgaccgtcgacgagtgagtacccacatgaaccccgccccatcgaccttcatgccggaccacaccccccgctgacacgggccgaccgccatcgcaccccttctcgttacggcaagatacaccctcatccaggtctttagcaaatgcggcaagatcgccaagatggattatctcttccacaagacgggccctctgaagggtaaacctcggggatacgctttcgtagaatacgcccacaaggacgacgcgcaaaaggcgttgacgaaattgcattcgaggctcttgagaggtcggaacttggtcgtcacccaagcgtccgctgtgagtttaccgtggccatcgaatcgaattgaatcgagcgtgtcaacgtccgatccgtccgcttatcaagctgatcacctcgacctcgcttccctctcggacgacatgcaatcaaactcgcggaccgacagtccccggtgtacgacccttctaaaccgtacaagcgcccaggggatacgaaccgtagtacgaccctgagtctgctcaagaaacagggtagacctcaatcgtacgtccaggcacttcaccgtcccatctagtcggatcgaatgccgacgacgttgacgttgacgcgcgctcgtctcgtctcgatacagtgccaacgcccagatcgcagcgctggaagccaagatcgcctcgatgcaaaactctcccttgtccaattctgcgcccggatctcctcgcccgggttcagaaggaggcgacgagatggaccaggggcaagaaggatggaagagcttgttggaagggaccgagctcgaagagcctggcacgtccagcgtcgggtcgaccgagccacagacaaagggcaaagggaaagccggggacgaggacgagacttcgaggcgtgcagaggtgggatcgatacccggagctcgaaagggcaaggaaaagttgcacccctcgttgccatcgaaaccggccccgccgatcggcggactcgggcaggaacaaggtcaaaggctgggcggtcaaagttctggtcaggggatggctcacgctcccagatctgggcagggtcaagggctaggacatacagtggggggatcgagtcggagagggaggatgtgatcgctcgtgatgttcgaacacgcgtgtcaactatctgttcaggttgtatcgattctcggataaagtaatactacatgttcacatcacctgcggatgcacgcgcctctccgcagactcttcttgacagaaaacgtgatctcggtccgtgagactcaaagagcgagtagcatgtccaatcgcctggccctggcttttgggcactgctccatcgcaccggacgagttctccgcctgtcggtacgcgaaacgggagtgatatgatcctccaaatctacattgtgaaaaactatacaacgtcttatgtcagggtcaggctagctcgaggttatagacacctcttcacatgggcaaaggcagggccggaagaagcgaagatccgtcagcaagcggaggggggggagagtgcggggacagggcaaaaagatactctctgcctgggaatcgaacccagcgcgggcgcgagtagtgttgatagttgatatcatgacaagcgccaatgttaccaatacaccagcaaagatgcactggaagtttaccgttaattgtcaatctgttctataatgcagtgatgacagaaaccatcacaaatcgcggccgtcgcaggattcacattcaaaggcctagttacaatgcgattcgacttgacaccggaatcgtccggtgggtcctgcctatgacattctaacagtatcggaagctcaccttgtaacgacacgtcagagttgtagatgtcgccgttgcaccgcccttgaatggatatcgtcagcatccaagatcagtgtcgctcagaatatcacaagtttcgtctgtctgtggacgggccctcccgcctgtaaatttgcccggcatcgataccggtggactatgaaatcctgcgctttgtgactagctatatcatcctctgctcagagacctcggtcttgaagtcgacatcttgttctccgatcaatgatgctaaagtccgccgtgatcatattgactttccaacggactcggaacggaggaaccaggtccactgagcgcgagctgggaagtggaatggtaggatgagtagccgacgaggtggtcatctggacccctttgataatgacgagaaatgatgaccttttaaggcggttgtttgaacttttgaagcagatcgcgctaaacaagaaccatcacgcaccctcctgtcttgttcgatttttagctacgcccgtacatgcatctaccttgtctcgatacttgacagtatttccccgagcgaaacgcgagtacggtacggccgccttggtcatccttgcaattccactaacaacagtctgcatgttgtcgatagcttccaggttagccgtcagttttgctagttccagattcttgagcccgccaaaaaccgaattcacagcaatgcaatgtaatatgacacggaattctacacgagcatggtatattggatggaccgcggtgacccgggcccgctacgcagtttcgccagtgacaaacgcccagcccgtgccagcgatgcacatcgccaacgaagcgataaagatgatgagatgaatcgagtccctaagacctccgcgctcctccttgggtatgatggcagtatagaatgcaatctgccgggaagaacgtcgagtgtcggcggtcaatttcggtgtggacctaacgacatggtgcgatctcgactcaccggcaacaatacgcagatgcagaaagttgtaaagctgcctaggaatgccatcagacgaccgaatccgggcaacaagatggcgaccacgacgcaagctgcggtaactccacctcgagccacgacgcgcataacggtcttgcgtttctcggacctgacatagtcggtaggcgcatcctcgtcgacaggctgaacggggaaagcaccggtcgtgatggtgtacgcgctctccatggggtcctgttccgcagcgagagaaggtttgttcttgtgatcgtgggcgtgaggaggaggcgggaccgagttgatgcccaaaagcgcttcgacggtcaggttgagctggtggtacgggtagggtgtaagtttgagtgttgcccgtccggcgttttcgggagaaacttacgggtcggcagcacaaggcgaacttggctatggggttgatgacctatcgtatgtgccacgggatgagcccggccagcgcgacgttgtcgagggtacagagaccaactcacgatcatccaggtggctacctggttgagaggaatagaaaagccatattgcggcaacaacaggtccttcatgatggcatcagagacgttgtttccaaacatgagatatccggcagtcccgctgatcgcaaagatgacagaggcgatgaactgtgatgttgtcgtcgagcacgactggccgtcagcgtactagacattgcctggagttggaacgatccgcgctcacgaaagcccagttgacgacgcggtcaaacttttccggagacttcatgtcgatggcgagactgggaatgatagcgtgtcctccgaaccctgcgatcaacagtccgaggccacccaaaaagttgtagttttccatttgcgggcccaagttggtatgaacgggatggaggatactccccggcgcggcgttcttggagaacccgtcaatgagcaggatgacgatcaagagaagcgaagaaaagagggagatcaaggacgggatcgagaggagatgaagcggcaagagcgtcgtcggagccacgataaagaagccgacgatcttccatccgtccgaggaaaagtgacccaggagagcttcgagcgagtcaccgagcaggacgatccacgcgatggcgagggcgaacaattcgcagcaaaagctaacaagtgtatcgctcaggcgacggtcgtggagcatgcttgtcggggtctacagtgcgactcacaggacgtcgacccaaagcctagccttccaaccaaaggccttgatacccaaatcgctgtagccttgacaatcggggtccgacatgatgatcgaagccaacagcttggctctggtcgggcgaggcagagttagcgaccgtgtcgtcggagtcacccgaacaagtcatcggtccacccacgtgtagttggtaacgaaaccgaaaaagatcaagagggccgtcccgccgatccaacctgcgtaggcgaacgcgagcggttccgagaggacgccgatgccgaccaagacggcgatcgcgttgaacatctacggagggcggggggcgagcgcgagagtcagtgtcgaattccagcagaccgtaacccttgggcgcaccgtctgtccgctcgtactccttccgacctcgacttgtctccccttgatgtctttgacaccgacgctcatctttctcgcttgcaaaacggcctgttcttgagccccggggctcatcgccagggtcatgctaccacgccgtatacccctgttgtatgacgcaaagctgccttgcctggcgtccctcctgactggggtggagagggcggacatgttgctcgctcgtcggggtttggtcagtggggtcgagctgctcggatcgacgctgggcgagagcggggtcattccacctccagggataccgcgggagaattcggtcggcaatcggagagagatggtcgaggcctttctgagcggctggacgtcggcagggtggtcttccgcctcgctctcctcgttgaggctcacttgaccttgctcgtcagactcggagggcgcgttgtcatcggcccagcctcggtagtctttagtggactggtcaaaggcgttgccgctcgtgatcgttcgttcggaatcccatcgcctcatcgggttggagtttttaccagcgttcttgccagcgttcttgccagcgttcttgcgtgacacatcgatggtgccgtacccatgcccagcttcgagtccggtgggcgacgtcggtcgtgagggagacggcgagtgatctgccgcaaaaatgtcgtggtcgttggaatcacgatcgaggaggtgaggtcggaagcgtggatgtttttgttttccagaggtggcgtcgtccctgtccccgggtcttttaccctctcgccgaccgcgttgaaaggtttgttcctcgcgatattcctgatcaggtgtatcgacgacgctctcgtcctcttcggcgatatccccgtcgtccacggtcgaaccaaactcgtcctcgtcgtcgtcttcatcatcgacgtcttgctcttcaccggcctcgacgtcctggccgccctcgaccgcccgtcttcgtcgacgacgttcggcttgggctcgactacgtctcttgcgtgcactacccgggtcgatatgggggttaaagtagtagtgcgagtcgttgccgccgtgagacgtatcgccgtcgccagtggaagacgcgacgaacgagggagcagaagggagatgagatccgaaaaagagttgttgagatcgcgagtctacgccgtggtcgtcatatcatataacatcagcctgccgcatttccccaatgatcgggactctacacgccctacgacctacaggaaaagacgatatcgagactactcttgatcacgctcttgtcttgtttacgcttgtcgacgacgtttgtcagcggtcgtggctgtgactgcgccgaaggcgagatcagaggtctgctctcggaagacgagtcaggcatggtccgtggggttcgtggtgggtgggctctaccgatgtggtgagttgttggtgagggggtgaatggttgggtcgtttgtgataacaatcaacagataaagtcgagttgggcagaggattgcttccgaggtcgtgtgtgattcggtaatgcttatgtgtgcaattaatgatcagttgttgtgcaaagaaaacagttctggccccttagttcagtggtagaatatacgattccaacaactcaagcttgctatcgtgcggtcgtccgttcaatccgggcaggggtcacaaatctttttgccccccggcgacatgtttcatagtgcgttgtcgactcgctcactaacacgcgtctcatcacggtccggcggttcacgtttcactctgcttgctacgttggtctcgctggttcccgtcctttgccgaggaaatgccggtcgttgaaacagctgacatcaggcgacgacgacgacgtgcaacacatcacccattgttacaagggaacggcgacacgaaggacctcgtcccgggccgctcctttggccgggatttgacgttctgaatcgacagcacaaaggccgctatactgaacaacggagaaacatataagtcgaggcactttcgcccatccccccgtgaaattcattctcccgattccaatttggatcatcctctcgtcaacaccttttttcgctttgatagcatccgttcttgtttcccctccgacgtctgatcatgtccgcttgtcacctcatcccgcttctcgccctagcggctacgattcccctcgcttccgctcacggctccctgaccaagatcaccgtcggtggcaaagattatcactcttggatccccaaccaggatcactaagctgctgtcaactttgccggaggagccggtgctgcggctccggatggcaagtaccttgtaagcggttcagcagttctctctccatgtcatggcaaaagtcgacgactgacgccacgcaccctgcagagaaagaacgacgtcctcgacaacggattcaccgacccttcctctcccgccatcgctaccggtggcgtcagcgagggtgtacgacgctacgagtccggtcaaaccatccccatgaaagctggagactgtgagcacctctgtcgagtcgggggaaaaaaactccgtcccccactgacgacgacctgacccgacccgactcctacctcgcagccgtcacgttcgacatgggcaaatggcctgaaggtcacagcggtccgatcctcaatcacatggcatactgtggccctgatagctgcacgggagtcgatgcgacctcgctcgactggttcgctatccatcattcgggatacgacgctgcgaacaagatctggcctacagacgtcctcgccactacgggtgcgacgcataccatcaaccttcccacggacctccctggtggagcgtacctcttgcgtttcgaactcatcgccatgcattccgtccctgcgcagttctacccctgggcagccgaagtcaccctgacgtccgatggggcctcgggaccgtccagcgagtaccttggcaagtttcccgacatgtactcggccgcggtgaacaacatggctctcgatttcagcctctacacgggcaacgacctgatgagctttgtcctccccggtgtacctgtctacccgggagggagcagcacggggaatgatcctcgtccggatggatctgctggtcctgctcccggggccgccgctcctgcgcctggcaacgataccgtacccgccgccgagtcgaccaccgccactggatctgaccctgctgctacgagcacggcttccgatgtcggtattgatccttctctcgtcccgtcgaccaccgaagctgttcccgcgatcaccggtactggctctcccgacaccgccccggtcgtacccagcatgaccgaagagatccctgcggagcccactactaccgacggagcccttcctggaacagaccctaccgggagcgctgtctcgtccgaagaacccgctcagacctcggaagtgtcatcgtcatcctcatctaccatcgccgtcatccctgtgaccacgtccgtctcggcggatatgccatccggttcggacggcgggacgtccccggtgatccctacgggagcggacgaacccgaggccgtctcttctgtcatccaacccactcagggaataactaccgatgtcgaggccccgagtagtaccgtccaagctgtcgaacccacgtgagtgcaagtgtccatccatcggcgcacttgagctgatcatacgtcggttccggtgatgctctacaggtctagcgttgttcctcctcccacgacttccggagacgaaatagagggtcagtacgagatctcaaagagtcgcttatcgaggtcttactcaagctaggtcgtctcgtagagatcactgaaaacggtcgtaccgtttacaaatggaacgggtccaccttcaactttaagaaccatgcctactaccacatgtgtgacaagaagagggtgagtggaggccatcatctcttcttccggggaccttatccaaatctacggcgaggtctgatagccgaccttgctatatgcatcagaacgattgccttgacgcggccaacgcgctccctaacgctcaagtcgatacggctcgtcagacttgtgaaaccgaggtgagcgtttctgattcccgtccggggaattcttcgggccggagcgatctagtcagtatccataatctcggccgctgatgcccgcttcttcgcctttcatatgcatcgtcgacctttatatgcttatccatctacaacaccaggctcctgcatgctacgcccaggtctcgagctggatgactaaacgcaggaggagtgccaggcgacacatctagttgctagttgaagcaagccagcgcggtggagacccggacccggacccgggacccgagtcatgatttgttgatgatttcgtcgtcggatcgcgtgatttcgtacaaagttgagaatcgaccgagcaacggccggggaaatgggaggggggagggataggtgctgcgtaactgcgtatcgttcctcttgacctatttccttaatgatacatccctctgttttttcttcttcgatggcgtataatatttgatatatcgtacccatctttctgttgcccaagagccataactcttggatatgatgataataatgctccgcctgctcgtatcagaccatcattgagcgaaacctcttgatcatacggacatatctgctcacaccagtacaggccatcagactagcctccgcggccagtcccaccgcctgcgaaacatgtccacctctttgagcccgagcaaaccacctagccgagaaatggaaccggctgagagctggttaccgacccaacacgggatccatccccacaggtcttcatggcgtgacaagctatggggagagatcgataccaaacggacgaccacgtcgatggtctgggcttgtttccttaccgggttcacttcggccgtgtccttttccgtacgttggggtcgatccaatgcgggtcgacgacgagctgacgagcggtattacccctatctctaggcatgttacatctggtgtggattccaaacgcaagtagatggtcgctcctgaacagactgtgtgaccggcggctgatacttaggactccctacctgcaacccaacagcggcggtgtagcccagctcggaatagccgtcgcccgtctctttggctcgcacaagacgtcggggtttcttatgccggacaaacaagccctgtgtagcctcctctccttcttactgggcacgagtctgggccggctgggggacaagatcggtcctcatagacgtctatggctgatgagcgctacggtgctccaggctttcctcgtcatggccgcagcgttggcctctcactacagcggacagtctgggatcgcagggtacgtccgacagactctggtatagaaacatgataatcgaaccgactcgatttgatctatcatgcacctcgtcacatcgatagagaccgggaagatcctagttggacgaatccgaccagtttcgtcgccttggggttcatgtccgcctcgctcggtcttcagggcatcatcggagtcgtgagcgtcctcacctcgtcacctcgtcatcccgcgaccatttgctaatcccgctcaaccgtaccccgcatggcaatcatagcgcttgaacacgcaagtccgataaccctcacaacgtttggaccgggtgggctgaccgtattgcttgcttgtcgacgatagtccctttggaacggccgtcgtcctgaccaccgtctgggtgacgacgatcaacgatccctttctctttgcgcttcgtctcgttccttcgcgggatcaccggctgctctccatcctcgccgtctttatgggagcgttcgtcagccgggccttgatcgattcgatcggaccggcggggacgctcgggatctgtgctgggttgaggtttgtcggtacgctcggatggctcggggtcagggacaagcccagggtgatacagacgtagacctaggacgtctgggtacgggaatttgtcgtcagggagattacaatgcgcacaaatatagatgaatcgcaatcggaggtccacaactgcagtaggatgaaggagcgatgatgctagtcgtgacgctacgcatgtgctccaagctagtacagaccaagcaggtccaatgccagagcctcgagagaaagacgggtcaagggtatcgtccgatctgattatacgacaatgtcaatgaacaagtacatgaatgaaaccaagacgaggagagtccccagcatatggcgccggttcccttaatcaaccatccgatctcggcgatgacccacccgccacacgaacgcgtgtatctgtggcaagaggacgctcgagttcgaacccataactaatcccatcccttcaagccctcattggctgcccggtagttgccccataattgcctgcctgcccctgaacctgacccgcactcggacccgcctggaccggtctctgcgcctggggctgaggttgctgctgtcccccacctccgaacccgctgaaccaaccccgccctgcggccgccggagcctgtcccggcatcggaatggtctcgccattgaccatccccgcgcccggtttgtactcgctattgagggtggcgtctccctgggtgatccccggtctgacaccgacggcaccgccgggaatcgagacgccctgggaagacaagtattcttgaccccggacggctaggtattcttccagcctgtgtacgtgacatcgatggagagcacggggaacgtcagtcacggtcaccatgttcgtactcaggccagggccaaagctggacgggggagactgacagatgagcgttcctactgttggccttgtaaacagcgacgacgaggtccccgacgagggggacgacaccgacacctgcgctgacggcattgttgagcaacatttgctgcaacaaccatcctgggatttccgcccgtttggccatccggatgacgagcaggtagttgaggatggcgttgacgatatctccagcgccgggaatgataccctattgaatcgattcgatgcgagtcgtatgaacgtatcaaggtggaaaaaaggggtcgagcggatcagcacacgaggcctgcaaattaaaccgccgaccatgacggcgacccgaactcgacatggggacgacgacggacgtacgatccaaaaagtccagccgactcgaagcccgcacaaattcattcccttgtccaagtaatgcgctctgctcttgactttctgtaagacctttttgtctctcttggatagtccttctgggagtgtcctctgccgtgccgtaccgaggatcgccagagcgaattcgaagaggacgtcatgaatgagggaggtcagcggagtgacatgatgcgtggtggtccggggggtgtcggaggtgactcactcggactcgtttcttcttgccacctgcgacttcgacatcttcgtataacgggtctgacggttcgatggacgccaggctgagtgcaggagcgggtgcggatcctcgggggtgagtctacattggagtctgataccggggcttaatcccccgtcgaacatgggcttactgtttagcgagtacgctctagggggaagaggtcgaaggttaacgagatgtttgagaaaagaaaaaaagttcaaagggagtctttcccgggagagggactcactcgacctgccttcttggcgaggagggctgccatgtcgacggtcaagtataaggtatttggtgttgttgtctgctggaaatcgtcgtcaacgatgatgattgcgttggtgttgttgtttgtataggaggcgatggatgatatccctactttgaatcaaccacctgtgtagcgagcgagcgagctgagtgtggtgtaaatgatgtaatcgatcatcatcatcatcggtattgttcccattttacttccgggaactgaaatcagtcgaaaacgcataaaaccctctagatcataatgaatactcattatgcccatcgataaccaccttttatgcgttttcaaagagtcttccatcattgagttcgatcattgattgttgtgtttttgtaacgtcagaggcggcaggttgcaggttgacatgttgaaatgacaggtcgggtctgtcatcatcataatcttgggagggggtgccatacaaataccatcccttgtcgacatcatgtctctatcatcagcagatatccgtgctcagctgggcaatgtattcacaaccggcgtcgaatcaccacccaaaagtctcaacggggacgatgatctcaccccgttccctagccccaacatggggtccttgaagagttagtcattcaagggcatccgttttcaccgccagcaaccatcaggcagctgatcttgtctcatcatgtgtgtacgtcagtccaccctgatcccgaggacgatttcatcctcgacaaggaagtcaccgaggatgacaaggcccaagcgcttaaactcaagaatgaggccaaccaggcgtttgccagtgagtcccccccgcctcacccgggctttccattcttcgaattgtagaccatcccactaatctcatctgccgtcactctcccatctcgtgcttgttttcccattcgatcccgccacacagctcaacaagattaccacctcgccatcaagctctttacccaggccatcagcttgaaccccaacgagccgatcttttggagtaatcgagccgcagcgaggatgaagctggaagagtacggcggggccgtcgcggattgcagttagtgtcgacgatgggtgtggtggaagatgaacgtcggcgctgatcgatgtggtcgtcctgggaatggtatgatacagccaaggcgatcgaattggatgacaagaacgtcaaggtcagtcctcgttgaaggccaccaaagctcatgctcggtcttacaccatctgactcgtctctcgtcctcgctccgcacggacgaccctgcccgacccgccgcctgtaggcacattaccgaagagccttgtcccaactcgccatcctccgtcctagcctcgccgttcccgatttcaagaccgtcctccgcctagacccccgtaacaagcccgcccgggatcaactcgagaccaccgtcaagctcatccgtcgtatagagtttgaaaaggccatcaacgtgggagagacggaatcgacttcttcccgcgtgacgagcatgatccaggacggggcgtgtcagttggacgcctcgggttggaagggacccttgcccgagtatgacgagacgcggaaacggtacaccccgacgctcgagtttgtcaacggcatgatcgccgcgttcaaggagggaggcaagttgccaaagaggatcgtctgggagattgtgctcgggtgtaaagagttgttggacaaggaggatagtttggtagaggtcaccctcgaaaagggtgtcaagtgtgatatcgtcggggacacgcacggggtgggttgatcccgccggcacataccttgcttgggaccaccggacgactgatccgacgctacctttctctgttgtcagcaattctacgacctgtgcaacctcctctccatcctcacccctcccgctgacgaccacgccatcgtcttcaacggagactttgtcgatcgaggttcctggtccgtcgaggtcgccctcacgctattcgcatacaagtggttgtacccgaagaggatctttttgaacagggggaatcacgagacgagcgatatgaacaaggtttacgggttcgaggtgcgtcgcgagggcctcgagagagacgggctggtgcgggggctcgagctgatttccgtaattctcccgtgtcggtgacgaatgggatacgctagggtgaatgtaaagccaagcatggagaattgacgtacaagttgtttgccgacgtctttaccgcgcgtgagtttgaccggtggagcggtccgatgtggatgggcatgtaccggaaggctgacgagcgatctccataccattgtattgacatctcggcgatagttccgatggccaccttgttgtccgcctcgcaacccccttcgtctaccaagtcggaagggtcgcaaccggcgatcctctcccccgagggcaagaaacgatatttcatcgtccacggcggattgttctcaaaggacggcgtcaccctggatgacgtgaaaaagattgatcgatacgggaaacaacccggtcaagagggactcatgtgtgagctcctctggacggatcctcaggatgcgccaggacgaggtcctagtaaacgtggtgtcggggtcggattcggaccggatgtcaccaagcggtggtgcgaggcgaatcaggtcaccgcggtcattagaagtcacgaggtcaggcagaatgggtacgcgatcgagcatggtgagtcgcacgcgatcggtttcgggtggtcatcgatcagggaacggaagctcagaccgtgcattcgacccttcacagatggactatgcattacgacgttctcttgccccaactactgcgactctaccggcaacaaggtgagcgcccaggtcacacgcgcgtcattccgcctcggtactgatcctgcagccatcatgttctccgtctcgcaggcagcttatgtccgaatgcaggacgatggtcaactttcataccaccagtttgacgcggtaccgcacccagacatcagaccgatggcgtatagtggagggttccagggaatgggcatgtagaggggtcaagtcaacgacggcggcggcgacgagggcgacctcgacgagagcgggtctgtatcatatgtgcatcgatcatcacgccgaggacttgaccaaatcacattcatatatgaggcagcgcaggatcgtctattcacgtcgatacagtttgagagccgaggccggccggttctactttttgccgagaacggcttcgtaggcctgggtagcaaggtctgcgatagtcgagccacatcgagtaaacatcccagcccgctgtgaatatggctcagtggcgcgactcaccggcagcctggttcatgagatcgccagccgtcttgacaggctgagagtccgccagaccgtccaacgctgcggtgacctgcttatcgttcgtcattccctcggctcccgtcttggcttcaggtttaagcggctcgagtttggtggattccagagtcggatcggacccgatgacgttgtccttctcctcgacttggccggcagagcctccatcgagacctggagaagcaccggtcggcgtgacagacatgcaggtcccctgaggtgcacccatctgaggctgagtgagggtttgacgcgactcacgtcagctaagtccgagggcgttcccggtctgcctcgataactcacgctaattccttgttgtacggacatgttacggtgtaagaagcgacggtttggactagctagtggatactcgaagtagagattcaatgtcattgtgctcgggcaaagataagaaacagggttgacgactgcctctatctctatatataatccccgaggattccattgagcagggtgacgtcaccggataatctcgataacatcacccagttgctgcttatctgaacattttgtgtcgaggcgcaggtctgtctcttacatcgtaaagcaggtgatatgattgggaatattattggacagcgtgcatggaaagcgggaaactctcggagactacgatcggcctgtctccattacggcaagctgatccccagcattgtcacaagcgggcggggtcttagctggtgtcatctacaggtatgaacgacgacgatcgggatacagacaaaggggcggggaaagactaatgtcactgaactcgatacagcgtggggggaacagcgtggggggaacagcgtggggggaatttaaccctttagacactaccacttctggacctgaccttcaccagttccgctgatggaagagttggcccagtacttgccggtcgtcttgccaatatccttgagggcgatgttgagtgggactcgagcgccttcctctgcatgggcattacagtgacatgataagtccaatgaatctcgaatgtggcaagatctcgaaaacgtacccaaagacttgggaggcttgccgatgagctgtacggaacgagtgacggtcgtgaataaacgacagcctagcacgaggtgaggaaagtgcgtcgactcaccgatcccatatcagaagagacccatctgatcatgggcgtcagactctttctcagtataacacccttttcaacgaaatcgcccttcgaggctcaccctggacaacaagcgttgatcaacacgctgtcgttctccttggccaagacttgggtgaaaccgttcatcagtgccttggagaccgagtaggcgagctgaggtcgaccccatccggattccttgaccttgttcgctccgactgccgactacgacagggccgacagttcgatatcaatgtcctgcgattcagaaatggaaaagccgtgtaccgagccggcatggacttaccaggtactcgtcggcgagaccttggacctcttcgagcgtcttgacgttcctgaacctctcctggatttcggcagaataatggttgagctgggaagcgacggaagagaggttgacgatcctcgatcctagtcgctccttcaacaagggtaggaaagatcggcacatctgcggcgtaacagacgttcagctcgtgcgtatcccatcgacgtgtcggacggtgaagaacccacctcgagcgtgcccttgtaattagtctctagagtctgcttggccgtatccagactatagtcatcatccagattcaccccggcgttgttgatcaagacgtccacgccaccctgatccttcttgatctgatcgacgagcgcctggatctgacccttgtcagtaatgtccaatcgggggtattcgaccttgcccttgagtccgaggtctttgcccgctcgggagcaggcatataggacgacgggtttaggggtggatgcggcgaggataccatcacagatggctgttccgattcctcggttctgatccaccgagttgcgatcgggtttgtgagcgttggaaacgtaccatgccgcgggatagggctcgatgccaaactcacagctccggtaacgacgacgacaaaggatgacatgattgcggattttggtatcaccggtttattgatgatcgcgggttcacgaggctggaacgttggagacgtctcttgtgcacaatgcgaataatatatccaattgtcgagacaggagtgttttgcaactcgatatcgagcgattgaccgaggtcgctcgctcgatcgatcggggttcgtcatcaatcgaatccaacaaagtctcatcacgtgatcatcggatagccgtcaacacatactatcacttctgtagaagaaacatcgatcgatctttgctgctcttggtgaagagagaacgcataacccatctcgttggactagccgaggtatactgaagctgcaccgagaaaggtaccacatcccctcatcctgccaagagacacgatctcaagacctcgctcgaaccacgtccatcgaaccgtctcgacgttggcgctgcttgacaatcctcatacctaacccgccagcttggggacgctttgcacgactcgtttgccccgaggaaatcgtctcatctcatatgaaaaacaaggcccatgcccatagactaaacgctccctccaaaggagaaaaaaaaagcccttttgccctctcttgggaacacacgctccgtccttcccgtatcccgacacactccgagcctcattctcccgcgttttgagatccgttccccggttcaaagttggcggggacgagggttcaagggcaccagatccgggtcgtacaaagatgtatcgatgcgtttaaaacttcttgaacgcacgagcggcctgcttgttctcgaggactgggtattcgaccattgatccaaaaggtcagagatggacgctcattcacgaaccgcgcctgcagagactcacccctcaagacgttgaacctgacggtcttggacaaaggtcggcattgtccgacaatgacctggtcaccagcagcgactcggaaagcgggggagcagtgagcggcgaggttcttgtgcctcttctcgtatcgcctgtacttggggatgctatattgtcattgccgaaagaaacgacactggtcagtatgaggacggcgagggtacggtcgatccagctgatggacgtacaagtggaggtagtcccttcgaacgatgatggtgttggtcatcttggtagactttacgactccggaaaggattcggcctcggatagagacttcaccggtgaaggggcacttcttgtctacagacatggacccggacgaagacaacgacgatcagtccccgagctataccacggcctgatgagaacaggtcgactgaccgatgtaagtcccgttgatggcctcggcgggggtcttgaaaccaagaccgacatccttgtaccaacgcttggtcctggtgttgaccttctttccgcccctgaccttggcgttgttgaagatgggctgcttagcaaagtgcttggcggtagtggcggtttgctccatcttgcctatttggggtcgagatggtcgacagcagagacggggaaagggggaaaaagtcagctttcacggtcgtttgattgagacgtcggtcggtcttctctgcaaggcggagagatgcgaggcggagagatgggacccggacgtgcgatgtagagtggatcggggcaacggaagtcatgtagctggaggccgggaacataggaaggagagtatggggaggtcaaactcggcctgggtcgcgatctgggcgtgggtctaggtaggtcgggcgtgtccgtcgtaggtgatgatgatcctcctactgcagtctaggtgttcaagagggcggatctttggacgatccattcgtctgttgtcgaggtcatgtcgatggtcgtcaaagaagaggatgtaggtgccgcgagatcgcaagccggacgttcaggacggctggccagtgaacaaccgacgtccatcccgcaaaaatagccgagggggattctcctgatgcgagatacatctggttatcctcggctacgtcctcctcctcgtcgtcaagatcgtactgccaagtcctcctcatccaaaagtcctgttcgtttcgattcgatgtcggtggtcgatcctgcgttatcctcttgacgatcccgtgaccatcccaatagacccagacccagagccaaccccagagcttgatcccagattgtactctccgaccccgtccccccacatccatcctgtccgctacacgtcgaaatccgacccgacaacctcttcgtcccgaggtatcctctgcctcgctgtctctccggcacttgcgagagagaaggtttgttcccccgagtcggtacgcacctgtcgattttgtcttcttgcctggactagaatctaaacgagaagggtggagaagaggagggtgtcgggatatggggcggctttgacgacaaggtctttgagatcgagatgaccttgattgggagagagacccgtgggcgtggcgctggtggtcggtcgatgagcaaaagctgggtctggctctggctctggcgcgttggctcaggacgagagaagctgggtacggggagcgtggtcgctaggagggggccaacaacagagggcggcagctaaggaagggggagtggagttcaacacgcgcgagacaagggaaagcgcgctcaaagactcgcgcttagctcattctccccatctacctagagcactcaaactcggctcgaatggaagcgcaactttccactctcgcgcttgatgttgacactcgaatcatttcaaataatccaaaacctcgatcgcctgatcgcaaccacccgcaacgcgaaccatcgtgtttcaccttgaacaccttcggtttggtcctcaaccttctcgaacaggaagacggcgtgactgtgattcagtcgtatcatccgatgtcgtgtcatatgctattcgtcctgccagtaccatgccatgccatgccatgccacgccataccacgaccactatcatacacgccctccttgccccgcgccactacatctcacccaacgcggtactccatctgaacctgatgctgaggatgcccatgatggtaaagcccggcgggtaacatccattccccccatcctctcaagtatgaactcatcggcgctcccgcccctccatcgatcgagcatgccatcccatgccgactctcaaagatgacgagactgcccgtgtagtgccaatagatcccaaagaggatggacaggtgccaaatctgacgagtcgtgacgtgggtaggatatcagctgtttcgtcctctccagctcgatttgtgccgggggagactgacctgatgactatgcccgaaacaatcaaacctccctggccatcgactctccggccaatgagtcgcgtaaaagctcaaccctacgatatacgccacccaagaaggagccaccggagctgcacgtccgaggatgaggatgaggatgagcgtctcgttcgtgccacaggaaagagttcagagttcgagggaatgacgcaacgcgaggcgactcaccggcgaatttgatcatcctacccagaccgtgcgtgatcgccagatgagtcaagggcgcgacggccgtcaagcagatggccaggaaaaaggcgatcctccagttctaccgcgcggggtttgttcgcatcagtacgggtcacaacggggaggggtcgggttcacaagtccagcatgacgccgggaggggtgcgcgggggggagggggaccgaccttgttctttcgttcgttaaaggccggctggaagggtgcgatcgaacccgcaatggccgaagctagcgtggtcagcgtgtaaatgagcaaggtccggccttgacagtagaatctgcagaggtcgcccatcaacaagaaaaaggcatcagcgggtgcatatggtgggaggcgacatggccgtggtgggaaagagaagacttgcccgttatagtagaccgtatggatcgagcacgagatgagccctgcgagacgagccagatcagaaacgcttcagaaacgcgctaatagagatggctggcccacgacctacaagagatccccacgtctattcgtttgacagccgcggatcgtggatcaactagtgtggactttaccgactaaccacggcgagctgctcacaatcgacacacgcgccccattcgaagattctccgcctagcacatcctgcgagcgtatgccatgaagcgctgatgacgagcagggtcagacgagtttgattgtgcttcatcttcgatccagggcagccgcccaaaagctcacctcgagatgagacaggccgatgcgctagcgagaaaggcgagcatggtcaagatgtccaacggcgcgggatcggaaaagggagggttgaagagggtatactgaaggagaaggccaacggtcagtatcccggccgatacagctactgtcagcgacacggcgtacaggaatgaagaatgctgcgagcaatactgaagggataaagtgcgagtgtatgttgactacgatcgggccgaaactcgtcagctcttccagcattcgaggcagatcggttcgtcttgactcactcgtctcgttgtgccagcgaaacgcgctgctgatcagtcttagaggtcccgttttagcgtcaagcgggatgaacctgacaacacgccgtgaaatataaggatgtacgtctcacgagatgaccagcgcctattccacgacttgcctgtacccgccagttacgtattcgttgttccgcatccaccaaggcagatcgtcaaacacgatcaacttggtcccgttctcgctcttacccagcgcttcgtggacagtcggtccgacgtctagcgtggcgacctcttcgatctcgacctcgagctcttcttcttccacctcgattcccttgtcactaaggggcacgccgtccactttgccttccgtacggacgagccgctcgtcctcgtcctcgtcttctgaatcggtcaacacgaccttccagaccgagccatcgtctcggctctttgtccttctcatctctgtgcctagcccgttctgcccctctcccaatgcgctcaagctgacactcctcgctcgtctcaattccctgacctcccgcttgacggcatagctctgctgccgcctcatggccgccgcaggggtcttgttggggaacatgtactcgggttcttcctcgacctcgatctcggtcttcgaagggttgtagagccgtttgatcatgctctttggtgacagtttcatcgcgatcgagctcgactcttcagcgttgtcccgtggcgtctgataggaagagggcgacttgtaactctgactccgtctcatcgtgcctagcctgacttttgcctttggagcagaccatgtcggataatcctcctcgtcctcgtcatcgtcgtaatcctcccacccgagcttctcccacccggaccagtcttccgagggtagcaggtttttcacgagtcccatgacccgcttcctattctccgcactgagccgggccgccaatccaccgggaggaggcggggaagacgctctgggttctccatactcctccgagtagttggaagagaacgccggttgatggtgataaggaaaccccgttccgatcaacccggggaggtgttcatgcagaaccccgagtcgctgaggcagaccttgcaggagaccgtggacgttacccgcctgagccaagttggtcaatgaagcgcgggaaggcaggctggggagtccgaaggggataatctgggggatagcgggaagggaggatatgacatcttctcggatcgcagagagatgggcgaggagcgcttcaggagagggtaattgaggggtagggatggaaccggacaagctcctcctcaaggctttgccgcggcgtctcaatgtcgaaccggtcgactccgagtcgtcctctgcattcgaaagggagctacccgaggatagtccgagagccgctgcatccaggtgtccactctgattcggaaacgccgtgccatcaaagtttgacgatgacatcgacgacccagcctgcgattgagcttccgcagcttgtctccccttgatacgctcgacaacgatcatctcggcttctcccagatatcccaacagggcatctctcaacgaagctaatgccgggtactgaagatccatgctgtgcaggtaggaagagatggattcctgcctgctgcgatttcggccaggagcggaagacgccgaggtcgagctgctctcctgtacgttcgaccctgacggtttcgatgcagacttgatctcctcattgtcctcatccgagtctatatagctggtcttgatgggctgttcggatcgggtcgatcggaacgccggacgttccgacattgttgaaaaaggtcaacactggactggatggtgatcgcgaacgtgccgagaactgcggggggggggagcgagggaggggagcgacaagcgaaagccacaaagtgatgcccacactctccacttcacccacctcggacctatgaaagccccaagtcgaagcgcagatgatggacggaagtaatcccggaagctaagcagcaccaagatgcgagcggacctcctggacctacctttggtttcgctgcgacggacggtacatgctgcgtaacaactattaagctatgatggatggcagcatgcatgcatgtacttcgtcgttcacatcggcacatcttgaatgcgtatcacacggttcagtcaaccatagccgtcagaattcgtcgtatcaatactagcaatttatcttgtttgcttccattcttgcccggatcagtcagtccggcattcccaattcaccgagccaggtcatcccatctcctacggttctcccgggaagactacttgcaattgtactcgtcaaagtcaagttctgaggtcgatctagttcgtgccgattcctcggtacggttcgatctgcgttccgcgaccgctggtatacatccccagccgacatccgcccccttgtccacccaaatctcgcaagtggctcacgaacgcagaatgatccggggatcttcagacctgccccttgcagcttggatcgcctgaatttacttatgcagctcgggctgaaatccagtaatcgccaagaccagtaaagtcggcgtcattgtatttgccggagacggaggtatgatagagcgcgactaggttagatccttacaaagtgttcaggagctgagaatcgcttccaggtaagctcagcctagggttctcgcctcgttgacaggtgccatttctgagtgggcggtatatgcttgtcacagcttcacgtcacatttacgtatcgctacatattcgtccgctatgaacggcgtatccgatcatggcgaaggggatcgccagtcagggaaggatagaccggtcaagccgaccagaccgacggcctccggaaccgagttcctgaatcggatcgtcgcggcacaaagacgtcaagccgggagcaggcccaagcgagataattcggctccacttcttgttaccgaaagctcttcttatgcccacgatgcgggcggtaaaacggaccgactggaccgcgtgcaatctagtcgggaaccgagagggaacgggacctctaacgacgccactcgtgtaggacgcaatctcgcattaccagccaacagaccatcaaatcgcgagcgcagccgccctcaacactctcttctagatcgacagttggacggcgagcctgacgatgcgcaagacttcatacgggacctgcctggtcggagcctacgcgagaccagcgctcacctatctccaagtttccgagatgctccagagaaacggctattcgacgtttcctccggcaccttcgaggagagaaggtcgtcacaacgggacatgcagattaggtccttaggctcaagtcgagatgcttcccgtgagggctcccgccgcgaatcagcccatcaaggagaagtgccggcagtaacggcaggtgtacgtacccaacagcaggtgacgccgaatggccgcaattcgatctggtcgcggggcggaggaatgggcgatattcacgcccaaagttccagcacaggtcgcaagcttttcaatcccagcttgcacgatcctttggcgttccagaaggctacaggaccaacagcgttcgcagtccctggtacaagtccgcacgtgctatcccttgagcctcccaatagcaccaaatatcaccgaaacaatcgatcagcattcacgaacactcaaccggattctcgatcacagatgagcacaggcgctgaagatcgcattcttgcccgaacaaattctgcgatgaaaggcggcgcacaagaagaagatgtgacgtacgagaggaggcaatacaaaattaccacggagcagattgatcaagacgatatcgcaggagatcgcgctagagagaggcggaaacgtaaagaaggaagtgaaaaaggcagtctgaatgtcgcccatcatcgcaagcgagatgaagaaaggagtcggggcagccggagcagtgaaggcagcgggagtttgaaggatagagagcgaggccgagggaagaggtaagactcgcttttacagaatctccagacgtctcgcggtcaggatccgtacgatgtctgaaacctaatcgttcctatagtggtacgggaattatgccccggttgcgagaagcttacaaggggatccaagctttagaacaaaatcttgccgatatccacaggaagatggcagctgatccagctggcggtgtaagaagtctcgttcgctcgggatatctgaaggacgcgtcgatggagagctccgccgagtttcggctcgagcaaagggagacagaggtctattcgagggatcttcataccaacaagccagcagccgcccggccaacttccccgaacgggcagcagactgaggatgaaggctggattgaccttatcagccgtcacaaacgccttgcggatgcccatcacgatttcatgaccgtatgtctcgaccctctcatacccgcctctcttcacaacctgccagtcaaatacaacattccgactcgtctatggcaatcgggctttcacctcttgctcgagcgtatgcggtatacctggatagcaaatatatcaaccggcggcggtgcgatcccttctcacggctttaacaggagtgcggaagccttacacagagatgcaaatttgtcagcgaaggcactggaccacctcaccgattttatatacgacgcctattcattctatacaaatctgctcgaggagcaggtacttttcaattttaggacagcttggctagaagcacttggcgacttggcgcgctacaggatggcaatagccgcccatgtcgctgcagctgaacgtgctgaacggaaccttgcgacgaggcacaaggccctggatccgacgaatgccagaatcgatgatgattacacgcgacccatcaggagtggagccagtataggagcagaagtggctgagaactggaacgtagaggaaagggaaacctggaggatcactgcgcgggactggtacgtacaaggcataaccgagcgtccaggggagggtcgacttcatcatcaccttggactgctatgccgagacgttcctggtgaggaactgagggcactctatcacttcggcaagaggtaagtgtgtatgcacacgcgcacatattttttaccaccgcttaactaaagcattgacgccctcccagcctgaccgcttctcatccttatgcgacggcaaaggagtctatcttgccactattcgatttggcgattcagagaaaacgcttggacccagacgcaagcgcgaccgatctgttcgtcttgatgcatggcatgctgttcagtaagatacagctggacgactttcctatggtgtacgagcgtttcctggaacgattggaagaggacactcacgaggatgatgacaatgatacatcgcgccagcagatcaaggaaactgagtggattctcatggccaacatcaacattgctgctcttatgcagtatggctctgacgagagtctcctgaagaaggctctggccgaggaatctgcatctagaaaaacacagaagccgcctgccactatcatgacctcggcgaatatggcctcgttagaactcgagcatgctccgggccacatcggtctggcttcgatgcctggcgaagccgaggtgaatttggctttcccggatcgtatagctcaagctgtcgacgtatcaacttcggcttcccaggttgagcctttcgaattcggtctcactccggctactttccagcacatctgtgcgctgagctttggcatggtcgaattttgcttcaggcatccactccggcggtggggcttcttcaagaaattgaatccctatatcacatcgatccttacttttctctgcacaattacacggcagtccactggcttagcaaccttggaacgcgccgtcccttgggagccaatgattgcgttcctgaacagtattccgccatctatagaacaccaagcggaatctagtcagaagctgacgggcgggacccctttgccagaggattggtgcataagagggatggaatgggttggcaggcgggtcttcgagcgaggcttttggaaaccgcgaccacaactgggcttcagcgacccatctccagcagtaccgctccagcacactgcatccgagacaaacaatgagatggatgtcctcttgtcagaggccgagctttcaggagtacatgaggacgaacgctctgttgaggaatatggagaccgtggcgggttcgacagcttaatgccggtgacgcagcgacgctggaggcgggtcgcgtgggctggaaggactcttgcccggcatgttccggggctcgtcgtcggtcaaatgtcttccgatgccttctcgatcgaggggtctttggccctcaaagtgacaaaatggaaacaacaggagatggaacgcgaacaggcggaacttgcacggcggcgaagagacgaagaggcacgaggagagtggccggaagacagccaaccgggacccgatctctgggaggatgaagacgatgcaatccccgacgacccactcttacttgaactcagagagcgacgtcgcaagttaagacttctggtacaggggcaacaaagtttgtccagcccggcggccaagccggttcgcaagaagggcgatgtcttgccttcgtccatttcctcaataccgggcttcactgtcctggtccttgataccaacgtccttttgagttcccttgaacacgtcgcttgcttggtcgaaagtgggagatggacagtggtcatacctcttccaggtatgttttctcccttactgtgtcggcatacgccattctaattctcatatacatagtcatcaccgaattggatggattagcgaagcagaccactgctctcggtccgtctgctatcgccgccattcggtatctggaggcaaatgtaaagacatactcaaccagcctgaaaatccagacgtccaagggaaactacctctcgaatctactcatacggtcggagatgatcgacagcagctctgaggtgtctccagacggacaatttgtccgacaccctactatggacgatcacatactcaaggtagccagcctgcacttagagaatttcgtcgaccgatcccgtctgcttcacggaaacggaactgtgccttcggaagatagcaagaaaaaagcggccaaggttgtcttcctgacgctagatcgaaaccttcgtcttcgtgccagggcgagaggtatcgaagcggccagcgaaagggccatggctgagatattcgctggagcgaggtcgccatccccggcctagccagtcagcccatgaatttgtattttattgcgcgcgcgagcgtatgtataaagtaatataaagctctaaaggcggacctaacaattgaaacaattgcgtgcgaacacgcattagagtgaagtaagaggtggatggtgtcacctgcaggacgtcatccgtcaattatgtccaaacaggcactcgatgttgcatgaaaatctgatggcctgcttgaaggtactacgtggagatgcgattggctcacaatacacagtggccggatgagtgttaagactggagagccactgtctgtttacgaacgaatgtcacagcgcatcaccattttgatgctcaaatgacaatcgcctaatcaccacatgtctcggtgttcagcctataaccattttatggcgctgagactgggagggtcgatctaccggttttgaccatgaaaaattcccagcttcacataggctagcatttgtcagaaaaggaagtggatcacataacgttcacccgggcgtacctatttggcggggacctcagaaagttgggttttaggggaactccggagtttggagattggaatcacgcatttgcgattacgcttatccggaacagcccaagctcccgaggcagggtgtaacagtaatgcgggtctcgccaacccttggaactaactcgttccagctatattgagactgaaggccagtaattcatgtctcgccaacccttggaactaactcgttccagctatattgagactgaaggccagtaattcatgtctcacgagtcccgcttgaatctctacctgcagctaaaatattcaatgcagtggcgtatgcagtggcgtcgaacctgaaccaccaactgtctcgaggcgagctgcaacgagctgaagctgaagctcatcgaagatgatcgagagagaccatgtaaattatcgccatgctggacgtgatggcacgaaatgaaatggaagagaagagggtaagggaggcgccctgtgtgatcctggaacgccactctctcggcgaatctattattgaatgccgtttgacattcacgtcctctggcgcactgtccgcccatactctgagtctgcaaatgggtaaactcagtgatgctgcaacaaatgagacggtttaatgtgaactcactggtacaactggtctcatctccgcatctcctctctggatcaacttaaatccagttgctcatcccatctgacagatccttgcatatacataagactcgtttttcaagcagatctcccaaaaaattgcccacgcattttatcaatgacgcactagctccccttgagaggtgtcagatcgtgcgaccaagtcgaatcattttgaatcgtgtcggaaccaatctgtgagggaggaggtaagactcaaggaagaagccttgagggggttgagggttaagttgtggacgaggaaactgaggcacaccataataccgacaatatatctccttgctccatgagcaacagaattcctcaagcccaaagcgagacttttgcccttcccatccctggacagcgcctttcgcaagcctgagagaggctaggtcgataatggggggttgcatgacctctggaagcaccctgtgccagcgatagacaggttgagaaagagtgagtcctgcctcactctcgtctctactggcaaagttggtctgtttgtcagacacaaccatatctgtcaggctgccagcagcacaaaatcttctccagggctcataatggtggcgtgtgtatgaatgagtgtgtttatagatgaaatacataactatagatgaagtacataatacaaaaggcggaaattgtgatgtttaaggtgtataggactatttcaatatacctctccaagaggtgtctctttggctggtgtatgtgggtatttgtttgggtagccagtatagacgtgtaacgcagaagatagatagctataacaatatctccagtgatgaagacttggacaagcacgacaagcatttcaacaaagagccagataacaatcaagccaacagccgcagcagcagaaaaatccgccataaattgttgtgaagtaacaactagatccacaaagattggttacttgctgggtctaggcactatggttggtgctgatgatgccttgttgtgaaaggatgatcaattttgcttgtataaaagtaaagtagtacatggtagagggaaaggaaatgaggtccagatggtctcctatatatactattctgatgagcatgtcctcctagtgtcctcccagtgtacttgcgactaggcttgtcgcgaatttgcgactcagacgcataagtgcgactccagttgcatgagcatgactccagtcacaacatgtgatcctagtcacatgttgaccctttgtgcttgagattgcaccctgagcatcacctatgatgacatagcatgccaatcttcaacactgcctctcaagctcaagctcaaagccctccttctttgacctgagactttgtatgttttgtcctttcttgttgaaccattccgaagttgttattctcattctgaagtgagccacatcctgaaaaggatggagtaacttttcgacttccagaatgtcttgtgatccctgctcactccatcactctagatgaatgagttgacagttatgcttgtgtttaatgtcctggaggggttcagtaagcatgtctgctgcctgatcttgtgttccaacatggtggatggtgatgtgtccattgtccaccatctctctgatgtagtgatatctgatatcaatatgctttgacctcttgtgatgagctggattgcttgccactgccagagctccttgattgtcacagtaaagctgagttggcttgtccttgttgatgaagcccaactcctgtagcatcctattgagccatatggcttcgttgactgcttctgccaaagccatatactctgcttcacaggtagatgtggctactgtgctttgcctgatagatgtccatgagactgctgatcccaacagcttgaagcagcagcctgtagtgctcctccttgtctccatgtctcctgcatagtctgcatcacagtatcccttgaggctgtgttgactgccttctgtgttgttgtccagttgacaagggtgagaaccttgtcaatggcacctttcaagtacaccaaagtcctcttggctgccttgaggtgttgttcagatgggttgctgctgaacctgctgagatagccaacagcaaagactatgtccggtcttgctgacatggcactccacatcaaggattccactatctgttgatagagtgttttcctgttcttgtcttccttgatggtgttgtcctgccttctcatgatagcatcatagagaggtgtggttgcagtcttggcatctcgcacgccaaacctatccagtaccctctggatgtagccttcttgactgagtgagatggtcctgctgggcctgtgtctctccagcttgagtccaaggatataggtggccgtacctatgtctgaccatttccatttctccttcaatgcatccttgatgccattgatggtgctcatgtcttgagcagcaatcaggacatcatccacacagagtagtagatatgcccgtttcttcttgtgatagtaaagtccccagtctgctgccaatctggtgaaccctaactctcttaggtatgtgctgatgagctgccaccatactgtcacgggaggtctagccgcgaagtcggtgaaaggttgattacgcgtcggtacttaatcgggcaatttagtaaccttacgggtctagacgtggggtaaagtgacctaagctcttgtattgtagtgatgaagaagagatggaatatcgacgcttgagctcataacccttgctcaagcgtcttcaacaatactaagatacaactaagatgtccttcctcgtacgggatagcacaaaaacctccggctcccgtacatgttgctctttggccaggttgtatcggtcataacgcgcgcgccgcgctgtgacacataccctaggtgattgcttgagaccatagagagatctgacaagcttcagtccagtggacttcttgtcttgctttgggtatctatccaggaaacccatgtaaatgtcttcctccaatgtgccattgaggaaggctgtatctgcatccatctggtagagctccaagtcctgagctgccacaatgatgagcagtatcctgagtgaggtaagcctggctacagggctttaagtgtcaaagtagttgatgccatactcctgagtgaagcctctggcaacaattcttgctttgtatttgaccacctctcctctttcattgagctttgtcttgaagacccatttggagtctaccaagctagctccctctggaaccttgacctcttgccatgttccagtatccttgactgacttgagttccttgtcgatggcttcttgccacaaatcagaccttcgatcttgcatggctgccctgtatgactgagggtcctcctgaacatctacagcatgcacacttgccagtgccatttcctctatgatgttcagtctgggtgatcttctcctgatgtctgccctgggtttgagcaacatgggatcctcatcatcagagtcttcttcttcctctgattctcctatctgaggggaaagttctctgtaatccattgcagggggattatgttgaactgcaggtggagaagttgtttgtctctccctctgctcctgttggtcctgttgatcctcttcatcctgtgcaagatcctcagtcacaggtcctttggttcctgcgtactgcttgtcaggaagatgtccttcttgctgtgttcccagtagggtggtagtgaccggatcactagctccctctggcctcctgaacactgcatccctgcttgtgagggtgacatctcttccttcttgttgtatgacaaccaagtagcctgctccagtgatgttcggatgcagcaactttcccttgattgctttgttggtggtgagattgttcttgagtctaccctccttgggcactctaacccaaaactctgtaccaaaggggtgaacttggccatagcctggcttgtgcttccacatgatctcctccagagatctcccttgatactgcttgcccatattgatgaaggtgcaagcatagttcatggcatggaaccaccacttgtgatccatcttggcagcaacgagcatgctagagcacatcttcttgagtgttctgtttgccctctctgctgtaccattgagctgaggtgtgtgtggtgtagtgacctggtgaactatgccttgtagctgcaaatatggcttcatgcctcctagatactctcctccaccatctgttctcagacattgcactttcttgttgaaagccaattctgacaacctcttggagttcttggcatccaaggacatccattgctgtctttgttttgagacctccactgcaggtcagccctgtcaagtcatcaacaaaggtcacatagtagatgtgcccattgatgtctggcttgaggggtccagctatatctgaatgcacaatctctaatggctcttgagctgccactgcgatgtcaccaaaggtaagcctggttgtctctgcaatagcacagacttcacactcttccattctgaaggtagatgtatccttgttggtgatatgcaactgtcctgatgctgcaagcttcttgatggtactgacacccacccatgtgtcctagtctgttgtgccatccttgtatggtgtccttgtcttggacggtgaggtaggcatcctctgccttgttctcctccatacgctctgatacagcatcttctgactgttcagcttgactatagtagtcctttctgagcggcaacttgaatgccctcaacgttcctcctgcacctgtcttgtagactgggatgttgatgccaccttggctgatcgtgccaccatctttggtgatctgcacatcccattccttctcaatgagagttccttgactgagtaggttggctggtgcaccttccataagcaccacattgtgtagagtcaaacagtgttgactttggggtaacttcatggtaaccttgcctccatattcagagactgtagcaccaccagaggctgtcctgaatctcttggggaaactcagcctctccagctggctgaacacatccttgctgttgcagatgttcgagctagctcccagatcaacaagccattctatgctctcttcctcgaccggagcagcatattcttctttagagatctcttgaatggctgcacctgccatattcctgtgcagtgctgccagattgtctgtagacttgttgaacccagttttactctgttgtacccagttttactctgttgtcctttgggtttgtgggtatatccatctcctatctcagaagatctgcactctttgctggagtgtccttgtttcccacagttccaacaagataggttgttcttgttgaaggactggtccttgttattcctttgttgaccatatcctttcctttgcacatgactggttctcttgagcatcattgcattctgcaaccttacttcatcctgacgcttgatgtcagcaatgtaagtgttgaacattcccctgatattctcaaaggtgaaagttggttgcttggtgatctccttgatccgctgaagtgacttccactctgacttgagggactcataagtcacaggtaaagccctaaggaaataggtagctttatcatcttcagacagcttaaagttggctgtctgggctttcagcagtagtgtgctgaacagctccaggaacttgactggaccatctccttcactcatcctgagtgtagtgatcctttcttctatgtctgccttgtagttcctgtcgtccacctggtgaagcttagctagcttatcccagatcatcttggagctatcgcatcctgcaagttccattatgatgcctgaggagacattgagtcccataaggcccatgaccttctgatccttctccttccaggtctttgttacggcgggtccttgctaagttgcgtctttgaatatctaagcggtatcagtacggattgtaggtagtcttcaacaggagcagagccgaatttggttgctgttgcgaattcggtttggggtaatacggatccaggttgatgtacggataaggaagcagtatcgcgataggcaactagggtcgagtgcatgagtcagtacgaacggtgagacgtctactgcttagcgagtgtcctgggttgtaacctcttcacaatacgtcttgaatatgcggtgctgttgcaaatcagtaggtgtaaatagaatgcgatattggaacttgaccttcctagtacaagaacattgtctcccggatttggtcaagttctactaagtatatatacgaaaacaagagtggtattgcgagttgagaacaataggcggataaggcaaatctgggacaaagagccaaagtgggagtcaagagtcaggcacctaatcacaggagaatcatcgtttgctgagtcagatgtctttgtttgatgtagtaggttgtccagctataaggtctttgttctttgttgaatatccgtcgatgttgctattgttctccgctggtggtgatatcgagtatgcgttgttgtgtcgatagtagtgatgacgatagcaaatatgtgttgtgtcaatagcagagagggtggcaagagcgcgcgcgccgaagccggcagcgtaggagccggatccgcgtcgcttcccggaacacgcacattaccgctgttgtgtaacggcccatgggttctgctgcggcctttacatggcctgattgcatcacagtgttctgagtacagactcactatcgttaccgtgccataacgtgccttcctgacagtagcatccaaactcgccctgtgacaattagatatatagcgggacgctcggtttgtagtacatagagtacatagcaatgcttgaggacttaggggactcaagcgtcgatattatatctcttcaatgattattgctacaagagtttagcctacttcaccgacggtcaactacttccgagatctcatacgcgtcttacggtactttacggcaattttccgacatttcacttacgcggttaaccctcctgtgacaactacccgttaggctgacagcaggacagggtcttctcagggacttgtgacgcagcctgtatataagtgaatgtgtttacagacaaagcatatgatacaggaggtatatctaaatatgcaggaggtatacagcactgttccactatgtcctttcgagaaaggtctctgttggctcggcccatgcagatatatgtatgggcaacctgtatgtacatttaccgcagatggctatagatctaactgataccaaaaatgtccctatcaggttgaataatactccatgcagtactgtcttttgttgtcatccgaattgctcactttgggtatctcacgtaccagaggtgcaaggctctccaaggtaagatcagaagtgaagctgcggccagattgggagaaatacacatggccaggatgatgatgtgacatgtaaccaggttgtagatagccttgcagatgacctagaaatccagttggcttccatctgtcagtcacgaatatgatagagacgattgacccgcttcaaattacgaacttctctcttatgtattctgccgtagatacaactatcatgtgcaagatcagataccgttgcacggatcttccgtgcaacagtgtgatatgatagagatgaattgacagagatcgaggcttggcgcgctgaacggcagagctttgctgatgtgcgactccggggtatgatgtttggagaggagaccaacggcgtcctgcagtggctcagtaaagcgatcttgaacagggcagccgtcaaatgctcttgtataggccttgagatggacggggcccgactttaagtatggagaggtaaggaaggaataagcacacatggcaacggccattcattggtgacacctgtttcattgaacagtatgacatgcagagacagtggccctgaggctagcccagactagctacctagtcatgctacctgctgatcgtttgtctaatcactgtacgtcgagtaaccgctgttcttactatacatctcacagtttcagaagatctgaatgagccgcggctcacatatccgaagcctggtcatggtatgcgaccgaatcctcctcgcggggcagcagagtccaaaccatcgcgctatgttgctccgcaattttttttgggtcagaaatggtgattccctagctattcacgcttttcaggcttcttgtcctgcgttgtttttctctatcccatacgtttagtagtgactcggtagaaagacagatgtcaggggtccttcagctctgagaagtcacaggggtagaatgtcgtcatatttatcatgtcatcacctagatatgaggcaaatcgtgttgaagattggcatgctatgacatcataggtgatgctcagggtgcaatctcaagcacaaagggtcaacatgtgactaggatcacatgttgtgactggagtcacgcttatgcaactggagtcgcacttatgcgtctgagtcgcaaattcgcgacaagcctagtcgcaagtacactgggaggacactaggaggacatgctcatcagaatagtatatataggagaccatctggacctcatttcctttccctctaccatgtactactttacttttatacaagcaaaattgatcatcctttcacaacaaggcatcatcagcaccaaccatagtgcctagacccagcaagtaaccaatctttgtggatctagttgttacttcacaacaacttatgagcccagtagttgtggcccaatctacatcagagttagcaaaccacaatcaacatcctcaactatcaggatcatcaagagatatcaccggacatagttggacaggattgatactgttgataatcatggatgactacattcaagctcttcagtcaccaaaaggatacccatcctgactggattggacaattatcttcaatggagaaatgcagttgaagatggagcacttgtctatggagcactacacatgcttacagaggatctgaaggaaagacctgctagacctacagagattgaggagaaggatggctcaaaggtagctcctgcctcagctatagtctctctatacatagatgttacggcggagcttcgctaagtcgcgtctaatgaatatctgagtgcaatgtcggtacggatcgtaggtagtcacaacaggagggaagccgagttcgggtaatgggagcgaattcggttgggatgatacgaatccgggttgatgtacggataaggaagcagtatcgcgataggcaactagggtcgagtgcatgagtcagtacgaacggtgagacgtctactgcttagcgagtgtcctgggttgtaacctcttcacaatacgtcttgaatatgcggtgctgttgcaaatcagtaggtgtaaatagaatgcgatattggaacttgaccttcctagtacaagaacattgtctcccggatttggtcaagttctactaagtatatatacaaaaccgagagtagtcatagcgggtcgagaacaataggcggtccaagaacggtgaagcgaattcggaacaaagagaaccgaatcgagggtcgagagtcggtcatctaacaaagatgaatcgttgttgctgagtcgagatgtctttgttcgatgtagtcggttgtcgaactatgaggtctttgttcgatatccgtcgatgccgctattgttcttcgctcatggtaatatcgaatatgcgttgtgtcgatcgtagagagggtgacgagaccgcgcgagccgaagccagccgcgtaggaaccggatccgcgtcgcttcccgtaacatctagatggttcgagcgcagttatcacattcgacatacgcctaccttgttgcttacttcaagagacatattaggagaggttacaaacaatcatcaacgagaaagcaagcgagcgcacagtaccgcatgataccgcgtcaagtatacatacgcgtcgccctatcacacgctgaaccctcactgtttctcatgcgtcttcaccaacacacacatccgcaccctgacacgtcatcgagacccatgtgcctgatatagctatattatgtatcattacgtactgtaccagagacccgcttgccaatcgcccgtaacactagtacggaatcgaacctcgtcgtactcgaatccccacgcttcgttgttgttttcgtcttgcttaatgatcgttcttgttcttcttttctttcgctacaatgctgatatgtaccttagagaaacgatacatactgccttggaggcgacgcgtatcttctctatcgtgtgggctgcagatattgcgctactttgtcggcaaacttgatacatagtaaacgttccggtggcggtactttatggcttctcaatatcttcccgtagtacatgggtaacccctgttatctgcctcattgttgtgcagaacatgtattgtttcactgatcctcaattgacacccaattacttcacacaaacaatggcatcatacaagtaatttagagacagactctaccaaacacactatttgtcagctttttcattctctcctcttcctttggctcaagcatatcagatagagatggtctataactagaggcttttcgaagcgtaacactcaaggacaataccacatgagtgagcagagatctggcttgcgctacccattcctgagagactgaacatgggtccatgctagttattacatactacagtgcgtgtatcttcagtacgaaatcctatacaggtgggtgcatgttcaggagtcacgtgatatgcaaggacggcttcgctgccaagccagcacttcacgaaggcgatgacatcagcggacttgaggatccgcttcgccatcatcggtagcatatccgtcttggctctcgctcagcagtagcaaggcgcatagcagtacactgaaggcgacctctcccggcagcatatgatgaccctcgcagcagcatcgatcggagcctatcttccaagactttgcgttgtgggcgtatacgtcccgaggccaaggatcaagtagcaagcagacgtcgtcttttgctcacgctgccgcaaattggctttgctttgttgccagagcggcttctagcaatgcactggcataatagcgatagggatttagtacaagaccgcggaaacatgaatacgttgcgacgaagaggaggccttgcatcgctgttccaatacagcgaatacgccaacgatcaaaatgggatactacaacagtgctactggccggactagccccgttttgaataaacgacggaacaactacactcgtcatgatcccgaaacgatggattatcttgtgcacttcaacgactgggtcggtttatacctgtggtatgggctcatcggcatcattggaattgtgacctttttgcattgggccggaaagctccaggtaagcgagccggtactcgtcgggtcaacaagtcggactttcgtactgaagaaatgtccgaccggttcagggacattatcgacgtcgtgatgcggggttccgttctagggagaagcgtctgcccaggactcggtcaatccgatcagtcagatcgataagctttcctgaaggctctggcgcgactctccactccaacagcggccgcagtacgggaagcgggacccctctcgtagtactcgaggagaggcatcggaacagtccgcgatatgcgcactactggcttgctgccttctggcgcaaatacagcattaaacattccgtgatagccgagtggtttgccttgggcgatctgggacagctgttcctcattgcggtctatctgcttttgaacttcctgctcatctttctcggaacggctggagatatagactggatggcgcatcacgttcgtccttatcgcgcttgctccctcactgatcctgctgacacaaatgttctacttgacaggcggcaaaattgacctacgcgaaccttccgctgataatcgggctcgccggaaagaataatgtactatccaagttaactggatttgcctacgagtcactgaacgttctacatcgctggagcgcaaggttcgtcattatcagtagcgccattcacattggtggaaggatctacgtaagtgccattgcatcttggtttacatgcaaatcgctcaaaggctgtactcgtaggtcaatgttccgagtacgaagactggcccaccgggaagcgcgtacatcatctggggatgggtcgcatttgctctgttcatttagtgagacgccgaagcgagttcggattggtcacccgtgatgctcaaactgagttgcctcatagcatgatcataatggcttcgcggaagatccgaaacgcagcatatcaattctttttagtgcgtttgagcttcgtagctcaagcaagtgcctgctcaccaacgttgcgcttttgtggactcatcagatccaacacattgtgctttggttcgttattgtggcgagtctcatcatccatcggccccaacttcagggctggatctgggctggtcttgccctgcatctgcttgaccgtgtcgccaggggctgccgtatcgcgtattacaccgtcttgaagagggtgtccggcgatgatgagcgtcctgaaggtactgtcacggtcttgactgaggacaccatccgggtcagcgtcaggactagacagagtacgccccatccagacgcgagatatggcaggcatactgatgagaggatgtctgcccattcagactggattgcgggccaacacgtctatctacactgtccgaagcaatcgcccggaggtcatcccttcactagtaagattgtcatatatactatggcgcggggttctgcagctcacctgattatgcgcagtttccaacatatcaagaccgctcgaccagatagatatgcatcggcctcgggaggcgacgcaggagctcttgatcagagttcgagaaggaatgaccaagagagtgtttgatgtcggaatgcaggcgaaagatgccgagatgagcgcgggggataagcctcagcaatttccaaaggaatcagtgccgatcaaggcttggaccgagggtccatgtaagtcgagaccgtgtagacctgcgtggtagcagagagctgaccttttttcaatctctagatggtcacgagaagtaccttggagaggattacaacactcttatgctagtcgcaggaggatctggagtcagctacactctgtcaaatgccatggatctcgtccgtcgagcccgcgcgatggaagttggttctgatagcaagaccgttgcgatcgcaacccgaagactgtccttcgtctggatggtcaaattcccttgcaagtctctttcacttcgactcattgtgcaccgaataacagacaatgttcgatatagatcaagtcgcatggatcagcgatcatatcaagcagatgtgcgagcttgctccacctggtttcctccatattacgatcttcatcacgtctaaacgcaaggcaggcgaggatgccgttttgcccggctatgtgacggaagacaaaaggacatccgttggaatcgagagcgaaaaaacagccatgccgtcggaagtcgagccctccatgtctgagcgggtcaaacatgggagctgcgttgaattgagatctggtcgtcccgacttccacgaattggtcgagcgcgaagtgcagaactcttcttaccaagagtgagtcagcattccatgcgaagccgcgcatagatcgcgttgacttagactatcaacaccttcccagttggatcggagtgggtgcatgcggtcctactccgatgaacgattcccttgctactgctgtcagcgaggcggtgcggcctggttccgttatccgaggagaactgcggcgaaacatctatctgacaattgagtgagtctagcaacctacctaatatccaccttgcaacacgctgaaccctagtattactacgtagggaatttggctggtgatgacaagatcgaagaacccctaaaccaacgacacccggcgagccggcttctataattgtgtactcgcaagattttcgttattgcaaacattgtaatactgccagctgaggcgctgcagtcgtaatcgaaatggtccgatgcacactgtcagacgatttggcgatggggttcacagtgccttgtctacggacagtgtgtgagtagtggctgcgacgcggtcgatatggtaacgcacttgtcaaaccgaaattgcttccgaagatcggagtgtacaaacgagcaccggcggtaccggtcatgcatgcttgtaacaatgtgcccattaagccgaagctgctgcaacctcccaaatggctaaactctactcactgctagctgcttgacgcattcatatcagctgttggtgtcgaaaagatacacagtgtcaaagctgcctcctcacaaaagccttctctcgctgcttgtcgatttcggccccgctcaggcatgcaagattagacagatagctcgccatgagttcaaatcgaggattaccgcaaggtgaagaccggccaagtccagttaggacagcagcgttcctccctatcttgtatgcggatactttggagaaggcagagagcttcacggatctggtgcaagaagccgtacgagctgcaaaggatgggctggtagtggtcttctacagaccctcgaagttcgggaacaaccctatcagcaatttgtcacccgcagatcgccgagatgactgggacagcttgcaacgcttctttggtatcatctatggtgctgctggccgtgaggctgcaagattagatcgaccgcttctggacgtactcgtgcttgtggacgggctgatggagcggactttatggcaaggtgatgtcagcgagatccttttgctagatggagaagaccttggtgagatcgccgaaatgaatactaaggcttaccattcagcttatgagcgcttttcatgtgttccagacgagacaacgcggtttctcgatcacaagccagcaccgcagattgtctcccgttttgaaaaacgtctggctcagactggaggtcgcggcctgtctccagatagctctagaagtacacgagcagtcaagcaggatagtcggcacccaatcacagctctgggtggaacattcgaccatctacatggagggcacaagattctgctcaccatggcggtagccataacaaagcgccgattgatcatcggcttgaccggtgagcagtccagcggagcctcttctcgtggagaagctgacgactgactcatccagtcgatgtgatgctcaaatccaaatcttatgccgacttgctggagccctacgagaaccgcgctgagagtctgagatcgtttctagaacagttgtgctcgggtatagattttgatatcgttgccctgagggatacatatggtcctacggctacggatggagagataacggctctagtagtcagtcgagagagcgccgcgggaggcctagcgagtaagtctgatggatcgccacgatcagctaggcatgcgctcattcttgatgttcatagttgaccgggagcgtgaacagaaaggcttggccaggctacaaacgtacatcatagacgtcgtttccggcaatcacaacttaaacgactcgaaagcgcggattggtgattctcaaaagccattattgatggagtcaaccgccgacgccagccaattaaaagagctgaagctcgggagtacgtttatacgacagtggctggctaacaggcaacaggatgcaaagtcgcgtgggtacaatgagtagtctcggcacctctgtacccctgacaatctttacggaaaatctgttatactgtagctctgtcgaccagcttgtcagcctctcgaaaagatcatctttcggcgagaccacagaagaggcagaaatcgtctgcccaagctgttcctcctaccatagccctgctcaatgcgacgcgcaccgcttacgaagctacaagccagagattgaggtggacttacagcgacaaagagctgacgcgggtgcgcacgggatcgaatgagcgagctgtcgagcaatgtcgaaaacactggaatctagaggctgtaagtacggcccctgcgttacaccgaatcggcgttaaacctccataacgttagtccattctggctggcgaggggaacgccagcttgaacccgccaactaaatttccaggtcttgaagaggaacagctgcttgtcgccttctatgcttcatctatcggtactattatcgccggaggaggactcaacaacggtcgcccgataccatctgcaatagagggcgtagccatcaccttcttgaagcgcttttatctaaggaccagcgttctggaatggcacccaaaggtcataatgtgggtagctcatccagccttcgcaagccatcgccacattcctgttgatgatctattatttgcgttcatgcaggcttgtctgcctttttctggcaggtaaagtgtgcaatcatgtctttgacatcgaccattacgttgcgtcattcaaaaagatcaagcgagaggatattctaggacctgaatatttggttctccaaactctgcgcttcgacatgtacgtaccacggatgcaagacgccttgcatggatggtttctaaaactgcaggtgagattcacccaaagcaaatggctctcggctttaatgctaacgatcgcacgcgaatgtaggatgcaaaccctacgagcatgaaccggatagaggccgcttacttcggcgcgcaattgaacttgaagcgttcaaggctatcggacgtcgaattcatctatacaccttctcagatagccgcaacgtgctttcttatggcagacgataatttgttccagacggctttggaccagctgctaccagtcctaccagattcgataggcgtggaggagacaaccccaagcggacctctttcaaagcagcttctcgccagagaacagctcctagacatcctgacacagatacagaccgccatcgaaagcgcacctgttgagggatccttcgatatgaataaggtcaaaggagcagacaaactggtaaagtctacccaagacccggcaagaaacaagacgtctgggttgtaagtcgcgatgttcccgccccttggcgtattacacgccctgatgaccgtattttccaggtaccgccgacaacagcaacaaactgaagctgaacaggcagaaagacgagctcttcgattgcggcgtgctcagcaagactcgaaggaccgcgacgacttctttggtgcgcctgttcgcagcagtctgcccattgacgagacaatgacagccgggattaaggcggaaggcgggggtctgacgttcggtggcgagggtctcaagatggtcggcatgaacctggacagctccgattccgaataacccattgagacgtaatcagacttcccgattagattatgcccccatgctacgccattacaggtcgcttgcgatgagcgattttcgagccttgtacaccgagacagaaaacggatcaagacccgtatcgtgagcttcgtgagccgataggactctgcctccagtattatgctcgtcagggtaggccgactgcgtgcctgctgaagagatggcttggggtccagctggcccggcggaagcgcttagctgtcgtggattctgtgttccttgccatactggcggtgtccggagactgaatcggtcggtatcgccttgtagagggatagtattacgagcctgctgaccaaaggctgacttagtgggagtgagcaaggtcgacagtggaagtccgtcgacgtcctttgtacctccagaccgcccggcttgaagaatcgtgggtgtgtacttctgatcggcttgactggacttcgaggcttggttgcgttgggctctctggcggattgagctggtagaaagagaactgggaaacgtaggatggtccatctcttgattctgtttcacgataaattggctaactggggtggtctaaaaatgatgtgagtggccttatatgagtacgcaaaggtataaggttgtatgaaataggtctcggcccaggctcacgttcgctatttccgccgctgggttcggcgtaacagcagtcttgcgagtctggaaaccgattatgtacgcggcttgaacaatattcataaagaacagaatatagccgagtctagctgttgcggtattgagcacggtacgacacggaatgttcagcgaaggtgatattgcctccctggaagcggggcttaccaacgtagaggttccagcttgtgtgtttccaaccaaaaatggtattgaccaacctaacgacagtcacccagaggtctgacctcacgatgagccaccatatgacgaggccgagaatattccatcgaagacgttgcgctgccaagagggtcgtaggggaagagggtcccgacatgtcgcttcattcacgttctacggtaggttggtgaaagagacggaacgagcagtgggacaattgttgagccctgtgcctttaaagagaccaccgatcgtgagcgctgctcgctggcaatccagcagatccatatccttacgctgcaattcgtcagcaaatcagtaggtccgcggccagcaggagtagtagatcgattacatcaggatgcagattgaacgatggaaccgatcaaataggacgatataactaacttacatcaagtactctggtcaaaggcgacgcgaatgaacggaagtaattgagatgattcgttatggttccccgtttcggatgcaaatctgatggcatgcgaggtgaacgggtcgctgcagctcggttgtcttcgaaagtgaatatgatggagtgggtactccggcagtagtaacgtagtacgtagtagactggcgcagctgcggtagtactgtgctactgtagaatctcaggaccggtcagtttcatagcgaggcctatccactcttcgactctttccttttgagaccgaagcactcgagcaatcgaatctggatctttactttgtggacagccaactcccacccctgagatgacgctttcccggcaagccttgaaagctgtcgctgccccgattctattaggcactcacacggttcagctgcttgcggtatcacgaacactgtcttcattgcggctcaacgtcgctttgccaagtcggtaccggtcaatccatgcgtctagtcatcgtttcgatataccccaatggccaaacccaccggttcctcaaccgagtgtaactccttatgattcaggcaactcgggtggctcgaacgcggatggcaagaaaccgggcaaaggaagcgtctacgctgagcttgctgccagtccgattgtgcaagctgccgttactactgcgatcggcctgattgcagtgtgagtgcagtatgtcctgcccatcagtacgtaagcccttgctaatgacaaaacaaaacacgaagcttcgttggtggtgttgggtaccttgcgtattacaaggccgacgtgttgaacaaggtaaagattatagctttcggatcctctccgctgcgcgcctgatcagttccttgctatcttgttcgccagatggagggtgcatttgctgcaggctatgaccctgcactcgaagtcggcaaacttcaccaccgaaagcatcagcagcaccatccgggtagtattttcgagtacgaaatgcaagaaggcgacgatgagataaatcctcagatcgtccgtcaggagcaagagcaagtaaacaagatagtgcggggggaaaacgtcggtaattactggatcctcatgggatgtaaaggcacggggaagaagcacacgattatcgagtctatgcgtagcattcacgcggatggtgcggcgttcgcggaagcacatagtgatctagaagtcttccgccttcggttgggtaaagcgttgcattacgaattcaagtgagtctgctacagctcccttgttgataacaagctgctgatacgagtcttcatctgacttagcgaagactggcaaggtgagttgcggccgtccgagggcgctactggggaaagttgaaatgcgtctgaatgacatgtttcactctctaaggttccctcttttcccgacgggatcctcgagaaggcggtcccagattagacattgagcgtggtgactatcatgtctcaacggtgctatatgaagctaccgtcgttcggccagcttaccacctttttaatgatagctatgaacaagcttgagaaggttgcactaaggtatacagaacggcgcggtcgtccactcgttctggcgataagtggtatgtcggcgctgccgtttacgcttgtgaaaccaaactgactgaacaaatcagatatacaccttttcgggaacgatcctgaggggattgccctggtacaccaactacagcagagggctgaagcctgggcagaagctggcattctaaccatgatcttcacgacggacgattactggccatatgagacaatgaaaaagaatgcgagccgtctaagggtgagagactcgttcgtttggttcctagttcgcaagcgactcacgcttaaactactacaggtcctgagtgtgccagatctatctcctcctgaggccttcaatgcgctccgctaccttcgctcctgttatggtccatcgaggtcgattgacaaggagaaggagaaggagcagattccacaagtgctacatcttttgggcggccgcatttcacttctcttgagagctgctaaggcgaacgatatgctcggtgagtacgggaacaataccggtctcgcgagacctccgaaattcatggctgactatctacgctatagaggaagctcgggacatgctagatgtagagcgagaatggataatgtcgaggtgcgttcgtttgggttaatcgctttcaacgacattgctgacatctcaactccaccgagatcagaatcggtcttattcccgatcatgacgatgacgtgatggacgagcaaaagttagtcaacccgcctcaaatgggctttgcttctgacactgactcgtattgcaattcagatggtcgaggtgggtacgaaaacagagctgtacccctcacaaagctaatgacgtttcatagctgttcatggctcctgctccatgaattcgtcaagcttcagaaggacagacttgcggatgtagggtcggccggatacctgcctgacatcgaactaccgaagactacttacggcaaagcgagagtagtgatgacgcgtcctggtaagtcggctggtttacgctgaagcgatttccacgctaaacactgtataccgtgacagatttcttgagtggcttagactatgcaaacgtgagtcaggtcaatatggtcggttccgatgactcagaacttaaacatcggttcccggcagattatctcaattgacgcaagttcagaccattccatcactcagaccgtactcagctaatgctcaggttacatccaatagaacaaattcaatgtccgtccggacagcatgctcacactcagatcggctgagcaaatcacgaacgaggaagatttcgaagaggaactgcaagccgtgcgcgaccgggtcgacgaaatcgaggggttacataggcaatccgaaatttgcgtcaaggaaccgttccagatccgcttcgacagcggcggatggctgtcctggctgtggccagtgcgcgcacatgtcatttcggttgaggggttgggggcggccttcgttccggcgaaagaggaaaaggaggcctagcggtgatagacaaacactgaagaatgccgctgtgaagtgcggctgcagatgacgattcctgagcttctcgcatgctagcgcctagtagccagtactcgagtagagatacctttcatataccctttcacgcgcgatgtatttcttccttgcccgtcaattcttatcgacaagtcagatttaaactgactacagtcgatatgagacctgacgtggcggtataagggcaaccaacgatacaacagatcttctgtgcatcctttgtgacaattccctttcatatcacaggccctttgtctgtttgctgctgcccgacttccctgacccggggttcgatagacacaaacggtggaggaaattgtcgtgaatataacaaattgatttctaccgaacaaccagtgcatcaccgttcatcccatcgtgcgtaggcagctctcttcccgaatttcgatctcatcagactatgtcgaacccgcgaccagtagcgctagcgaccacaaccgttaacaacaatccgctttcgattcgggtaaccgatacgtcgcggggcgattggggcgatgacaatccggccaggaacggaaacactgttcaagccttcggagatgcctctgaccctgtaatgaatccggatcttcctacaagagattcgctttacattttcgtgaacttcagctcatatacccggacgccgaaacagggatctcagggggtgcgagacgatcaactcaagcacgcgtccagattgctagattatgcgagggtgcgtttccggatgctgcgcccgcaggatgataccccctagatcacccatttacggttagagtttcttcccttaggacctggctcagcgaccaaggaatcgcgttagcacgctacatattaaatatcgctttcccgaagagcccgggggcaaactcctgcaaggcaatccccgcccatttcctgtgatgctggatcccgtaatcaagatcgacatgggtaagtgaagcctgttttttttcgatgggatacgtgagtatctatgcagactatcgaatgtgaatcctcgcgagcagagccaaccgggacattcgaaccgatttttgctgcggctatttttcagcatattgcgcaaggcatcaccccggctccgaaacatattgtcctagcatatgtaggggcagatgttactgcgtaagttcgttgctcaattaacaggctccggaatgccagtcaaattgaggccgctttcgcagcacccatgtaagggatctttcgatttggtgtgccaatcgagtccccgcggttaccacattctccgtgacggaatgtcgaatcagagaatctcgtccgctggaggaagccttgggtgaagccattgacatttcaatgtatctgaacgagggagaatcctcgatctgtcacaaattccctggctctggagaaagcgcttccgcttaccaaacgtttggcaattcgacctctggaggttcgtacttgcgcgctaaagagcaagcgctcaggcagttcggcgttgtcatgaacagctacagcagcgccagaggtagttggatgagcgatgcaggaatgggctctcctaatctccgcgctcttcgcgggcacgccctcgaggccatcatcgacgctatgggactgggcgacggcgacgaggctgccgcgaatcgtcaggaacgggatggttctgaatcggttcgacgcagagactttgccgccaaaaggagcgacaattccgctcccaaaagatcatggaggcagagcaatggatctgaaagtatgaagggagggaataggacgtggaaagatctagtggtcgcgcagaacgatcggttcaacccagaatacctcgacccggaggtataagcatagtgccgacccgcaatagactcgatgatgtatgttgtgccggggctgcgttccgtataaaatgatatgcccaaaagaaaagagaaggatgtccgtatctattagtgagatgagccctactggtgtagaagcccctggcaggctccttcaatgtcgacaatttccttaggggcattggccgatagattgagcggtccttcgctcgtgaacgcgacagcatcctgatgaggcaggagtcaattcagtcgactcttcgctggagtgcaacgggatcatagcttacctctattcggatacccagaccgtggaaagcttttgggaaggcatgatccgcagggacgtaacagccaggctcaactgttatcacgttcccacacacaagactgggaacaaccgagaagccgtgaatcgtcgttccagtgacagggcagaccgatacggtcgcaatacttactgtccattgcggttattcgaggcgcaatcatgaagatcgctgcctaggtggtgggatatgtagtgcggatactggatatcgccagactgatgagcgctcatcgtccgatacatcaaattgcgggcgagacctcacttaccagactccgctctacgtcgcccgtgtacagcttgaatccgatctgcttcagttcttcagttaaaagactgcagcctgtgtatatcatgtacgacgatcagctgggcaggctaaataatatctgcaagagatgaagatgaactcactcatccgatgaagttcgttcatcccgatctcctcggcgacggtacatttttcgatgcatcttttctggacgttcaatacggcttggtatagatccttctgtggctccgagaaattcccggaaacggggaacgtgcgcgtgatatccgaagcataatgcgaatactcgcatcctgcatcgatgagtagcaattcgcccggctgtagtcgctgatcgttttgagtgtaatggatgatacaggcatttgcactaggaacacaaggagagaaacaagtctagaactctgcccatccacgttgaccactacggcttaccctgatgcgacaacgggaacgtaagctggccgttcggatcctgtcatggcgcaatgatactcgaactcggcggcgagcatgtgctcggtagttcgctcccctgcaatcatacgtcgggcggtcatcctcatgacccgcgtatgtgcctcgctcgagatatcgcccgcaagcttcatcaaagccagctcatttgtcgatttaacgaagcggagcctttccacttctggcgccaaagggtttgccgtttttgaattgagaagctgatgcaaagcaaggtgtggtggaactgtcagggaggagaaggcgtttgttcccgacaagaatttgccgagagacgaaattttgcgtttggatgccccgtcctctgtggttggatatggcgacgagctgacagaggaggaagtggcgggaggcaattgcacgaaaaggttgtttgccggcaggccgctcacaagcgctgggaggtgggatgagaatgttgaattggggtacgctgcgtctgctccgaagacagagacggctgcgtccggtcccgttctcgcaccttcccatctttcctcatgcgaatcttttggtgggacatataaagtatacgtatagccttttgacgacgaaggtttcgattctgcatcaaaagccgttcggcattcttagcgtcgttggtgtgaaaagggatcgctgatcatttacctagcacaaggacagactcgggttcatggaatccagtcaggtagaagaagtcggtcgctataaagatttgcagtcgaaggaaaatcagcctggtgcatgatgaggccagccagattcgatgcgacacgtacattggcggaatttgtaactgaggcgaggaacgtcaagagtgagcgggaatttgcgacacaggagcttcccggatgactcgtgctgttgcaactaacaagatttctgccgtcattgcaggcttgaggtcagcgagacgtagatgcgaaggttgtgccggcaagaccgatggctcatgactcacgttgcgtaacgagtttgacggttcctcccatacaaatcaccttactgccttccggcagcgaccgcatcaagttcctccgccgggtttcatattcagctgagggtataccccgagtcaaatctgtagccttctgtaccatgtgggggtgcgtcatggcgagaggctggccgtacaatggcggcttagcatgagctgcgctctggctcgcatatgatctccgccgggacacatgcgatgttgaagatatatgagacctacccaatactgcgagcggcaagatcttgtcaggaaaaaaggcttctcgatttctatcgtatcgctactcacctaactttgggaagggaagcatcgccgttgttcgcaagctcgaaggaaaatgtctcatggctgactgctatcgttcgtgctcctcgctcctgatatagatgttatcctattatatgcaagatattcaaggcagtcttgtgtcctagatcggatcctgtgtgcgtgtttcctcgtcaatccaatcttgttgccgatcaatcatggttgtgagaattaacatcatgctcgctagaattatccaagccgatgccaatggggtgaacaggtcagcggcaagtctcggctcaaaacgaaaccgataagttgcgcgcatgctatgacgaatcgcccccaatttcgtacagtatccttcgaccttcccatccgcccatgcaactgccgtgtctcgggatttgctgataccgctcaacccagaccacacaacctacaagtcgttgtgccttgaaagagacatcgagtgctctgcataggaggacacaagctcaagttcacaatctagaattcccatcattcaacaagatgactcggactgttcgcatcgccttattactttgtgataccccattacccctggtccaggaagagctaggattctctacctatcatccggtctttgaatcccacctccaggatacccttgcatccttcccaaacaaggaaaaggtcgaggatgtcgagcttgttgtagacagctttgatgtcgtcaagaaacaggaatatccggccgatgacctgctccgttgcggtcattacgatgcggtcatgatgacgggtgctggtaggtcgatctcgattgcgactcctttgctctcgcgatgactgctcaatcaaacctttcttgtcctcgtcccagcttactctgcttatgaaacgcatccctggctgatacgtctcatcgactttatcaagacgctggccacctcggccgagtacgaccgactcaagatcatcgggatatgcttcgggatgcaggtcctggcgatggctctcggtggccctcaggcggtcgtgccaaacccagaaggctgggaaattggggtgtacgaagtcgagctgaccgaggctgggaaggactggttcgagagggctcaacagaagggccaggataggatcgagagcagcgagcaagtcttggaacacgtgacggaaaccaagaccatcgtgagtcagatacggtggcttgagcggtgccaatgtcgcatgctaataagtgggctcgatccatctcctagcatattcaacaaatggtgaggacttgcgctcggacggactgcctcttctcgcaagagcaagcttgctgaccctcggacgactgctttatatggcagcaccgggaccacctggctcggatccccgataactttcggttgctgggatcgtcgccccggtgtagggtacaaggtattgtacagtactacccggaaagcgactcgtcagagcggtcagatgggggcaagaagatcaggatcatcggtttacaaggtcatccagagtttacgccggtgagtcggtggagtaacgccaagacgaaacggatccgccttttgctcctgaccggcatgatgctgacactttcgcgatctggtggtaccactctaggcgatcgttgatcggatggtctcggtccgatccagaaacggagtcattgatcgggatacgaccgaggaagcccagcgaagaagttctgcaaagaacggaggagaaggtcgaggagtgattggatggggtctgtggtctatcttgctcgaactatgataggcgtcatgtcgcacgtcgtcgcccttatctttatccgtcgtttgtacctcgatcttgttgtaagcctggtcacgtgataccgtcgcgtcgcgtcgcgtaagacgacgagagagagagaaagagtcccgtgccgctgcccctgccctcgcattctaggacaaaagagaaggagatgatccgttctgaaacgtaaaaccaacctagcacgcgcgcgaagggggaccttaacgtttcgacctttagatgcgtcgataagaggtccagatcccgtgcccacaagaaatcgatcctggatccagatcgagagccaacagtctctcgaactccgcgtcaaacgggattgaatatcgactcgactcgattcgatttggaatcggatcgaaacggatcggaagacaagaggagtaggtcgacgaatcagtagaggatgaaccaacctcctccgggccttggaggtccaccggggctaccgggaggagggataagcccgaacccctcctccaacaccaactctggctcgaatgcgaacgcgaacgcgaattatggtcagaatcagatgaatggaggaggaccgcccgggttgaatgttcctccaggaatgtcgggtggaggtggatcccccggacctcctcccggtttgagcgtcagcccgaacctccagccgaacccgagtccgaacaacaatgctggcggagtctccccgggtcagcaacaagcgtctggtcagggatcgacgtttgggtccccgattcacgggttcgtccagccacaactctttcctcagccttccctcggaccaccttcgtcttcgggtggaatgggctcgcagcatcagcaatatcatcaacatcagcaacactcgaacaacacctccaactcgaaccccaattcctcgggtagcgtgagcaccatcgtcaaggcgcagatcgtcttcctcctcagcacactcaccgaagacgcatgggaacgcaacgtcagcgagatccggacgttgatctcccagaacgcacccgagatgtatcatcatttcctgaggaggttgatcgtcaacgccgcgcccgtcctacaggcattacagtcgcaggccgcggggatgcagcagggccagcaaggagtggggatggctcaaggggatagaccgttgacggcgagcctgagcgtaccgcagaacggaccgggagtcttggcgtggagggtcttggtaagcgaaggtgtccgggcggcaagggattccaacctcggtgagtctcgcctggagtgggaggatggtcgcatcgcaacgtctcatctgatattgagctccgatccgtcgtcctttagccccgcatttcgcatcgaccttgctcgtccccgtccctccttctacccaacccgccatcaacctgaacttgctccaactcgaccacatgcaactcttttcattcgcatgcaacgtgctcgcctcgcccgcgctgatgccttcggtcgccatgcatgaccgggcctgcgcgatcatcaggacgtattacgaacaggccgtcggcacactacgtcaaccgggatcgagcttgtttggaccggggacggacgatctgtctccaccggaagcgagaaactttatcctcgccgtctacccccgggttcccgaggagggcggacccaacattatcgaccctacaccggcacagttgaacgctttgccccaactcccgctcgaatcaaggcaaagggaacgattcctccaagcgctcgtcgtcaaattttcatcccccgtcgtcatcatccaggcgctcgcgtccatctcccctggcgcaccgcctgatcaccctcgagctatcccgctctcggacgtcttgttcgaagtaggcgacgcgtggacgagtgacgctgggatcgtctggagcatcgtctgtcggtggtgggcggcaatcatcaataacagggaagaggggtcgacagaggtcgagacggcgttgacagagacgtttacccaattgatccgcggcgtcgaagagggaagatcggtcgatgttcagggagtcgtgcgaggattggcttccatcgtgagcgtttgatcgagattgcgtagcgagatgtgacctcgatgactgatgcactttttgcgccgattccatgttgctaccagcccaatgtcgactgggccgatgtcgtcaaagagttcgatcagggcaacacggtcctcacgaaacccgccgctcaggagttcttgttcggcatgctcgccctgacccctaccggccctcgatccgctatgcaaggcctgttctcctcggaattccgttggacccacaccctctcgcttttgcatgtgctcaacaacctgttgactgtatcgtcggatcgattccccatttcctctattccgtcgaccacccgactcgtggtcgaggaagactttggcgatctctcgtcccccgtccaggcgttggcacagggagtactcggatcgacctggaacatcaaagaattgacagatattctcgccgaggtctcaaaaaggttacaatcgcaagacgtgcaggacaaggagttggtcgagacggcgtgggagatggtgctcgaaaagggaatgaagagcgcttccgatctcgtcgtcatcgggtttagcatggtcgaggtgagtactttgccgggttttcacgccggtccgttcgctggggctgatcttgccactcgatgcttcgacccgatcgcagcgcccttggtccgaggctcattcaagcatcgtcgccagtctcttggccatgttcatcaagggtcaaccgacctcgcaattggtcatgtccgtgctcggtcgtattcagcccgacatggttgtcgatgccctgcacaagaattacgaggagaacgagctcaacgtcaaccgggtcgtagagtgtggccaagacgcacaggtcttggacaagctgctctcctcgccatctttgccactcgccctggacgtcgccgccgtcgccagcaaacgcgacctcgtcgatctcgaaagctgggtggtcgacgggatcgaaaagcacgggtcagactttgttcacgcagcactcgatttcctcgaccgcaaggtcaatgccgagtcgagcggacccgagacgcaggccgagacggttcccctttccccgcccgtatacgccacgttcttcagagcactccgcaactcggacattttgaatgctgaggatatcggtcacttcaaggagattcgaaacatgtgcctccagattcaccctcgcctcatgaacctcaatcccgaggccaacaccgaacccggtctcgccgtcgtggcgttcccgcccgaggtggacgctcaggtcgatgacttttaccaacgcatgtatgccgaggaaatctcgctcgatcacgtcatcgaggtctttcaacggctcaaaaagtcagagtctcgacaggatcgtcagctctttgcgtgcatgctgcacacgctctttgacgagtacaagtttgtgcaaacgtatccgccccgagagctcgccatgactgggctgttgttcgggtccatcatccagtaccaccttgtcgagagcacgccattgcacgtggcagtgcgttacgtgctcgatgctctgcagagcccgccggactcgaccatgttctcgttcggcaagaacgccctcaacatcttccaatcgcgcctgcccgagtttcccttgatgtgccaggctttgctcgagatccctcatcttcacgaaagtaacccggtcttgatgtcgatcatcaggacggcgttgaccgaacgcggaatggacggagaaggtggtggctctcgacccagctcgcccgacagggtcgtcttccctgccttgcagatcgaagagctcgaccaggacgagcccgacaacgaactgactcgaccagaggagaggacgtccgatcagatcctgttcatcgtcaacaacttggctccgaccaactttgacgagaaggcaagcgatctcaagcgattgatcgccgcgcgatactcgagatggtttgccgaatatctcgtcaatgcccgtatcagcgtagagcccaacaatcacggcctatacatgcaactactcgagacgttgtcgctggctatcctggagaagcacgtcttgtgggagacctaccgcaaatcggctcagcttttgaactctgaaaagacgctcgaaaattcgcaggacaaggtcgtcctgaagaatatcgcctcttggttggggaaattgaccgtcgcacgagatttgcccgtcaaacatcgccagctctcgctcaaagacgtcctggttcaaggttacgacgagaagcgtttgcaagttgccattccatttgtctgcaagatcatggagcagtgcgcaaagtccaaggtcttccatcctcccaacccctggttgatggccgtgatgggtttgttgaccgagctgtatcagttcgccgagcttaaactcaatctgaaattcgagatcgaagtgctatgcaagacgctcgaggtcgatctggcttcaattcagccaagcgacatccttaggaagcggacccctcctatcccacctacccaacctgcacgactcgcacaggagctcgacaggattacgatgcccgctgctggcggatatatgggtgctggaggtgtgccttcgcaggccggtcctggtgaagctgctcaacaggcagtccaggatgctttccttcgcaggatcgacgagctcatcgctcagttgcctagccaactcctattcaacccggcttacccaatgttccagtcgactacggccctaaagaggatcgtccacctctcgatcgacagggctcttcgagagattatcaacccggtcgtcgaacgatccgtgacgattgccggtatctcgtctcgagaccttttgatgaaggactttggcatggaaagtgatgacgccaagcttcgacaggctgcgcacctcatggtttccaagctcgctggcagtctcgctttggttacatgcaaggaacctttgagaaccagcatgttgaacaacatccgtacgatgatgttgcaaagcggatttaccgaggtatgctctttgcctgacgtacacaccgcttgacactgactagaactctcgggtccactaggataccttgcctgaacaagctatcgttggtaccgttcaggacaacctggacgttgcctgtaacatcatcaagaccgccgcccaagagaaggctgtcaaggatatcgatgtcaacctcacgcctgcttacgcaacccgcaggaagcaccgagaggtcagtcctcatccgcattcgatggcattcgccacaagtaacgctgacaatcgatcgattataggccggtcaaatcttcatggacccgtcctcattcagcaacatcgtatccaggtctgcacttccagagacgctgcgtctcatacctcatggcctacagaacatccagctccgtgtctacgaagactttggcgatcaatcccgattcgccgcttctgtcagccaccacgaggctgaatacggtcaatcgcaagatgtccaaggaatgcagtctacttcggcagccgagacgatgcgaaacggtgtcagggctggcgattcccctgccattccccttggcgaggttgtcgaatcttctatcatgaccgccaaactgactgtagcgcagagcttggaaaagttccaggagctcgtcatggagttggacaagctattgtccagggcggacgtcgactcccttgctcagctaccgctccatcacgacatcaagatgatcatcagacagatccccgtcattgcgacccagtctgcatttaccgatcagactgctttggcattcagccagaagattgttcaactgctctataagagcggatcgaatctaggacgagaagtctgggtcagcattctgcagcggctctgcgacctcttcacaaaggtcgctaaggaagtcgtgcagtggttgatatatgctgaagacatcgtaaggcggatctcttgatcaagcgacgactttcatcgctgatgcctgttcctttcttgatgcagcgcaaattcaatgtgccggtcactgtcacgcttatccgagctggcctgattgtggttccggagttcgacacccagctttccaagatgatttaccgagaattctcccagtccgtggtcgactttgcagcccagctcatatctgaggcggtggtaggaaacgctccttgcgcttccaggagtcaattcagctcttccatcgaggctttaggccgagcggcggcgaacaggcggggaaccccatcgtgagtggtgtcttcatggcgtctttttgactcgcttaatgacttgagatcaccgccacagtgtcgagcacctccttgaagatctgcgaaacaagagctctcaatattcggccgagccgtcagagggcagcgagcgcggtggcggatcgcccaaagcgattcgaactcaaggtcctcccggcagccagagcatcgatcccgatctgcgagctaccttgagcatctacttcctcgaatgggttcgattgttcacttcgcccttgccggtggagaccacgttcgtgccttttgttaatcgattgcaaaagcaagggattctcaagggcgaagagatctcttccgccttctaccgcaatagcattgcgttggccatcgacatgtacagcaagcacaaggccagcggatcgccccagatgttccatggagttgacgccttgtcgaggttgatcgcgctcctgctcaagaattactccgatacgcacggcgtgtcgagcgactcggccaagacgctctactttgccaagatcatcaccattgccgctctttctctagtgcgggaccacgaggagctcggtgccaactttgaacaaaggccctactttaggttcttctctagcttgctgtgtgatctgcagataatccaatcttcgttccccgaggcgtactacggatgtttgcaaacctttgcgtaagttacttgcccctcagcgtcagctcacttcgacctttacttatccgtcaacaccttgacaggaaccacttgggaagcattcagcctacgatcgctccggcgttctcgtacagctggatcagtctcatctcccatcgacactttatgccccgtcttctccagggcaacaacaaggaggtaagggccggacgattaggtccgagcgatgttctcttgactgacattctgtttcacattcatagggctggactgatttctatcgggtcttgatggcgctgttcaaattcctcaacccgttcctcgaagcggctagcttccaccaagcctcccgaattctcttcaagggtgctttgcgaattctcttggtcatcctcaaagacttccccgagttcttggtggagcactatatcggcttgtgcgccgccataccggcgcactgcatccagcttcgcaacgtcgtcctatgtgcattccctcgcggggtgacgttgcgcctcgatgtcaatagcttgtccgaggtgccacctttgcccgagttcaaccaggttcccgatatccgcaccgactacgtgcgcttccttgaggatgcccagatccgacaagccgtcgaccgctacatcgccgacgaaacgcccaacccggcggcgctcgtcccggaactcagaaaccgcattgcgatttcgattgccgagacggacggttcgcccggtgtcaagtacaacttgaccttgctgtactcgctcagcttgtacttggggtcttccgccgtaaaccgctcgctcgagaggaacggccgagtcacctttgaccctcaaggacctgaggtcggactgttgaccagtctcattgctagcctagatggcgaaggtacgcctggctcgggcgtgatggatgctgggactgttcactgactttgatctacccggctttctcaggtcaacaccacttcatcaactcgatcgtcaaccaactccgataccccaacgcccataccctcttcttcatgctatacgtcctccacctattctccaccgctcccaagaacggagatgttcccgaacggatcactcgggtcctgctcgaaagggtgttggctcaacgccctcacccttggggcctgaccatggcgttcggcgagctgttgcacaacgaaaagctcggcttttgggagtttccttgggttcgcgccgaacccgaattgctcgccatcttccagaggtgctacggttctggccatctttgatcaaggcgaagtcgtgagtcgcagcgggcataacgttcattgcaaaccgtgactgatccgaatggggtccacccagtctcaatcatcgcacgacattcgacggaagtttacggttacgacacccaataatggatgcctggcaacaatcaaaagacgattcatttctcacgatctcttggtgaaattctccagggggcctgattggcagtatattaatcatctctcaccttctttctctttgtaacgtgtacatgtgtattacttctcaccgaccgtagagtactcgccgcaaaaggttctgcctctcagcatggtcatccgggcgacctgttcctacccaaattgtactatttagccagaatttgtgcatatgatgtcgttgtcacactcgaaccggggacacgaggctcgaggacaattatagcgacctggacaaatttggtcgaggtcgtcggaagaactgcggggccccgcgtaggaggagcgtctcaatacaggatcgagtccgaatcgatgagcaaacgctcaacaactcgtctgcaacctcgaaaaagaggtcggctatctgtcatcaggttttggcacccagctcaagtgtacaggatatatcctgcgtcaagccatcataattacacccagcaagatagctcgttgcataggcataccacttgaatatctcgctcgaaagcaggaacacaaagggaacagacaccgcatagagccttgacatcatgcttagcgaacaagataggcaaatagcagagctcgtaagctgaacagggagctttcgatgtgttctggaacagtctgacatttggcaatcgctttccagagtgagaatctgctggaggccatgatttcggatcttgctacgacaatcgcgattgcgggtcatcgcgaggtcaagctctgtcgcacgccgtgccatcgctgcggaactcagtgagtgactcctacaagctttgggtcggttatatcggaccattaactcgtgcccgacctcccctcgctcttgcagctgtcgaggaaaatcccagctacctcctccgacaacagcagtctccgcgacactggcacctccaccttaccaatcgaatggaggtgggaacaagtcgagatcctcgaccccgcaacttggcggtgatggctcaggctcgacaggccaggtgaagaacggcgtcgtgctgctaccatgcttgtattgcgggaggcaaatcgcctcgaaccgctatgccccgcacttggcggggtgcctcggactcgctggaggctctcgacggacagcccgtgcaacggcgactgggaatggcaagtctcggtgagtattatcgagagtgtagagagtatagcgaggccgacatgttgacgccatcgacgacatgtgttctagcatgggatccgagaggtctgcgtcctctttatacctggacaacgattcggatgcaggcagcgatgcgagcggtcctacaagcttttcggtcacagcagcgtcggcagctttgcccaaggtgacgagggggcctggacggcgtgagttggcggtgcagttcttggaccgctcagctgaggtgctgatctgacgtctctggcatctagcccctaaaaacccgaatggcaaaagggtatggtctgcgcatgcatctccggttgtctatgacgttgtctgatcgacatgtattgctacaggcgaattcaccggcaatcaaaccgggcaagcagaaaaaggccaagaacaatgccagtaggtccttttctgatgctgttcctctggcccgctcccgaccctgatcgtcgctattcaacaggcaacccccatcccctcacccagtcggcaacttttgccgcttcaccgctcgcgccgagtctacctctcgcagcgggaacacatggcacctcgcggcagtatgccgcttcccaggcatcgcacgctccagacggtgacggcgacgaggacgcggagggggaagacgatgttggctttgaggaaggatctgcggctggcggatacatggatgcagaaggcgaagaggacgacgagtacatgcacagtgataacgggagcgacggtagcgataatggagacgatcatggacaggagatcgatggtgagactctcggccttgttaccaaagagggggatcgcttattgaccatataatctgcaccgcgtcgtcgcagatgaatatgcttagtccgaaggtcgcttcggtgttgtataggatcgcacatcggctctttttctattgtaccaagttgctcagagctggtgcgattcgttatcagattcataaacaacaaggtccacagctatgatcttgatgtggtccagacatgacgtgcagggcgtcagaaggaaggaagaaatgtatatttattggttgtgagcttacgatcgccgaacaaactcggtcggccgatctagggaaagtgcgcgactgccttggttgcggggtcaatcagattctcgagttgtcctactacttagtactgttcatcaacagtccttgtctgccaagtcgtcgatccacaacacgttgctaatgactgcagatttgtccgctatggatgtccgttacgagcaatatgtaggagaagagagggatatcgcagccatgatggccttggttgatcaggagctcagtgaaccgtacgcatcgattcgtcttggcccgatcgctgtctcgacttgactgataattgcatagctagatataacagtacgtgccgaatcatcttaccttgagcccgtataaacaagctcacccgctctgaggagtagtctacactttccgatatttcctcgagtcatggtacgttgtcttccagctgctgctaaggttgtaccgacagctgagaacgtactctgttgtcaggccacacctctgtttcctcgtaagaagcctggttcaacatgtggagcatctatctgcgaagctgacctgtcgcatatctcggttcatctaggcctatcctgccctagaaggcgatgataccgcttcctcctcctatcagccgatagcgtgcgtgatcagtaaacaggaatcccacagaggcaaacggagtcgaggttatatcgccatgctgagtgtggagagatcctggcggcggagaggaatcggtatgtcagtctggcctatcggagcgactgaaagtgctgaagcggacctgtatctctcagcccgcaaactggtcgagatgacgatagacgctatgcgggaaaagggagctgacgaggtgcgtgatagaccgtacaaaatgcttttggtctactctcctgacgtcagaatatgagaacaggtcgtcctcgaaaccgaatacgacaatctcgcctcgttgacgctctatggagctctggggttcttccgggaaaaaagattacatcgcttctacctcaatgggaaagatgcgtacgtgattccatgccgcgccgatcacataaacccttattcatcgaatttctcgctcggtcactcgagcaggtaccggctagtattacctctccgaattttgaacagcaacgacgacgaggatccagggcatcttagcgatacccaatcggagaaaagcctggccagggcgaatttgccaagcgcggccgagtgggtgattgccaacggagacgttgcggtctccaccgaagatatcgagaggcacggtcgaaacggtggggaaagcttgtcagaagaagctcaaggtacaagaaaggagattgcagcgatacttgaggggatcgaccgcacggacatcgcctgaccgggaagaacagtagttgcaagagatggaatatagatgtgtacaccttttacgatcggaatcagaagataagaataacgatacaacgaagactgccgaccctcacatgatcatgatcactctatctccattccatccacgctggcaccactctcaggctcgagatcgtccatcatggcatcgagcaagccctccatgccgtcctttccgtcgagttccccttcatcaatctcgtcgatgccgtccagaataccaccatccatttcgccgagtacatagtccaacatgaaggtgtcgatcaacgctcgatcgagtctctgcagatgtcgttccgtgtagggtacgatcccgtccaaccaatcttggagcgagaccagctcctcttctgcccgtgttggcttgcgcttcttttgggtctctagggcgattgccgcttcttcgtcttctggttcgtcgtcctcgtccgcagacgctttgcccagggaccgtcgggccttttcaaagcattctcgcaattcctcgcccttgcggcctcgcaagatggctcccaagaccctttgcgcggcaacgctcgtgtgtacccgcgagttccagtcgcgcacgtacttgagtaaccgtacgaggtccttggctgacagaatcctcaggacctcgtctaccgctgccaacccggtagaactagcaaagtctgccgccttgtcttcctgtgagaggtcatcggtgggtcggggccggctattgtgcaccttttcaaagaggctcaagagtcgtcttggctgagccatggcgagggcgagctggatcgctcgcttgtaatcgttcaaggcgaggtatgacgagtagttttgttcactactcgatgcaaagcgagtcagtgtgagggtgcgcgcacatctcgtgatggctgcactactaacatggcaatttcgtcttcccgcttcttgacttcctcttgagcgacctcggcagtacaatcctcccacaagttcaaaacactgtcagcgcctccagacataatggtccgctggtcctgtgagatggccaacgtccacacctatcgcacgtgcaatatctcgcattagtcggacagatcccatctcgacgcctaccggcactgaccttgtcgacatgtccatcgagcgtgcggacgcactcctcgtcccggaggttccagatcttgacgagaccgtccgagcccgtcgacacgagctgccgtccttgcgtcataaaatcgactcggagaacagaattggtgtgtccttcgagcgtctggttagcaggaagacaatatcagcccgatgcacgcaaggacgagctacaggaagcaagcgactcgccttgacgcaggtgaaatcgtcgagtgaccagatccgggcgaccttgtcaccaccacaactagcgatgaccttgtcggtcggactaaacttgacggcccagacccctcgtcgatgtccctggcatgtcccgatcaatcggatcgcaccggaagcgccgctgaacccgcctccgttgctggtcgctgccgagcccgactttctcttgctttcggtaaagtcgatcgaaaacaccttgatcgacttgtcttgcgatccagagacgaggtagccgtcgttgggcgagacgtcgaggccgttgatatccttttcgtgaatcttcatcgtagtcaaactcttgagcttgataggttctcgggggtactctgccgggtcggtactaaggacggataggtcccacattttgaccgtcttgtcctgcgacgccgaaaacataaacttgccctgatgaagcgaagtctttctcgccatcgccacggcaccgatcgattcggcgtgaccctctgcgatggcgatgcacctccacccgctcgtggcgtccttggcccagaccctgacggtgttgtccttggacccagagaccaaccaccgtccgtccgcactgacatccaggcagaggacaatgtccgaatgaccagagatcagacgagcgtccatcgtggccacgtcgtaaacgcggataagggacgaattcgtggccagagcgatgtgactgtcggtccgatccgttgccagcggggagaggtagacgctatcgataatctcgtcattgaaaccgatgatttgacgggtgattcgtttggtctcgagcgaggtgaagatgatgttctgatcgtggtgaaccgagacgatctgacggctttccctgctgtacctgtggtggtataccgacgacagtcgagcggcttcagcatcggctcgccaacataaaaccggccggctcgtatcactcacaaaacctccctgattcctcgtgcttcatcatcctcatcctcgtcctcgtctgcattctcctgctccatctcgtcctcttcggcccctcccctccccccaggtccgtccaacttggcgatctcttttccacgcaaaacgtcccacaacctgacgcctcccttttctccaccggtatacgcgaccaaaccgcgcttcttaccgtcgacctctccggacccgcccgagagcgccaagggatcgacgaacccaaccgactcgatcgtctcgttcgtcaaggtcgtctgaaccgtctttggaggttgacgcgagttggctcccgatttcgatgatttcgacgacttggatctcgatgagatgccatgcttgccttgatcgtcgagttgcgagtatcgactcccgaaatcccagagcaagaccaccctatcccttccaccggtgaccatccatctacccttttcctgctcgagttcgtccccgtgttgaaacgtctcgttgacgctaatcccccggacgacgctgacgtggccttcgaggatgtggagaggtttccctccgttacccgatcgatgagacggatcgagcaggtcaaagaccctcacgcgggcatcgaccgaaccggtgatcagctgcatgatcttgcctccctgtgccgacggggacgacgaagaggacgacgagcccgactgagcccgaacgttgaggttcatatacccattctctcctcccctagaatcaccgagcgcgaattgatcctgttcacccatcaacaacggctcgaggaacctccatccgaccgccgagacgcctcctccgtggcccttgaagacgtgggtgacgaacccgcctttcgtatcccagaccttgacgaccccatccgcggaccccgtggcgaacagggtgttctccgtctcgttcccctcgtcgtctatcgagtgagaagatgctgggaggggaggagagacggacaaactgatgatgggcgcttggtgggtctggttcttggtgagctggcggttgtatgagaggaagggaagtcggggtttcccgttcttgagcgtcgcgggttgattgttactggagagtttcatgatctgggtcgaggacgacgggccggacgtaggggacaaggcgaggtcgtcgatcgcgagaggataataccgcacggagagggattggtgtgcggtgatcaacgtgggcgggtacgtgtggtacgacaatgcgatggcggttagtggcgtaccgtcctgagacgcagatcaaagcaggatcaatgcctacgtgttagcaggtcgactcctggaatgtggacgattcacgccgaactccgactcacccccttgatcctcgctagacctctaccttcctcgacttcggacacgagcaactcttcctgttcatcccccagcgtcgtaatgatatacttgccatccctagtgatagccaccggaccccctgtataggtcggatgcaacgatcgaggcgatgctcgaaatctgcagggtcatcgaaagggtcaagcataggatcagctcggctcgtcgagcgggttcgtcagtttgcgttaaagctcacgccgttttgagcgtcggatcgctcgacattatgagattgtggagcttgcaggctaggtcgagggtgtgagagagtgtgatcggaacggcggctaccgaagtctagtcatgaacatcaccaccatcacgacgattgaatttcccaaaagtgacctcgacctcgacctcgacctcgacctagcagctcgtctctgtctcaactttgtttgaaaataaaaacgcgtcgcccaacacaaatatttatttggaacagacctccacttttagactaataatcccgacatgcatggtatggtgtttcatcacatccctccctctctcaattcataccaaccaccctgccagacgtactagaccctttcaaatcgatatacctcacacgtcctccttgctccatgaatcgtcgtccacctcgccacgcttccaccaatcccctcgcttcgtacggcgggatcgtatcatcacccgtcccaacggtcacgtgcaaaacgtcgaccaacgtcccacacaaggcctcttccacacgcatcgcagcgttcacgtcctcctcgctttgccccaaaatcccgtcggtgccagtaccgctctcgtcaccgtcaatttcgacctgtggacgaggtccaggtcgaaggttgccgacgatgagcgacatgaccctatcgttccagaccaaacccgtcgcctcgaaatcgaacaatgtcggggtagtcaacctacccagggccacacatgccttccacatgttttctgcgggtccatgagcccggcttaaccggtccgaggcggcatggaagagggcgtcgttcgtggcgacctcgtcggccaccgtcttttcgtgcacgatcgtcacgtggggtttcgagatgatccgaccggtatcgacgagcttgtccagaaaggccaaaccttgcctgcgcgtctcctcgtcctcctgcgccccggtttctgattctgatacggacgcgggagtctctcgactcaaagccctcctcgccatctcttccagctcaaactcgacgctcaaggcgtaatacctcaccggtttcgagggttccccggcgagcgacttgaccagcttgatcttgtaccccaacgcatgatccaaggctcgtctcatctcgagatcgctcggcatgggcatgtccttgccaccgaggacgagcgggaataacccacgcaccgccgtcttcaggttatcctccaacgaacccacgacgctcagcctgatctcctcgtcaaacaaccctccttccgggggtacaaactcggattgaaacctcttgaccacggattcgtgcctcatccgatcctccttgtccggtcgaagcgactgatggttctccccccgtttcaacacgcgttcagaggctagccggaggaccttgttgtaagggtgtcgatcgacgtcgtacacgagcgcgatacgggtgatgttgaacccggagagctcgggggtgtggacgaggttggagacttcttcgtgatgctgcggaaggtgattgtttctacgtggtcgagtcgtgtgtatacaaccgggtcaggtacatggcagacgattctctacctgggcctttgcagacttaccgatcggcaaagacgatggcgtggtctttgagcgcgttcttgacgttgctcaggaaagccggtccagtctttttcgtctggacgtcgtcgctctggatatgaatcatcccgggtaacagctggctcaacgcgacccccaaaaccgtcttgcccatccccgggatggcgatgggagcgatcaagaatttcttctcggaccaaggtttgggcgtatcactgctctccctcgccttgcgccactcttgttcgccatcaccctcggtccatcggaggaatgcttcacggaccttgacgatccccgtctggaacccgtcaaagaattcgggttcgtcgatcatcttcctacctacccactcagcatacacccggctctcgggtcggcgtaacgagctcccgagctttgtccacggttcggcgttgcggttcttgcgtcccgcgcatttgggtttccggaggggtagcaacgtcttggtgatctccctccattgacggtacatcatgtaaggttcgtcaaacttgatcttgaaaaagaatgggcttcctggagggtaaggaggttcgccttgaccctctatcgcgcccggtttgggtttggatgacgacgacgacgacccggacgcggtatcggccacggtactccggacgacgaaaccctcgatagggtctcccttccacttgccctccctggccacctcgtcggcatagtcgcgcacctgccggatcgaatccaacgtgacggacgcggtagggatgaaaccccacgtcttggcgaattcggctacctcgtctgggggcaaggtcgaaaagtgcggagtgttcctgttcatcccgtgaaggtggaggccggtgagatgctccggagtggcaaggacgtgttcctcgaaagagtcgtcacatagctatcgggagtttgcgaggtcaggcccatcatcaatcgtcaccggtggtcctttccgacatgcacgagactcacctccaagatgcaagagataccttcccgccacaagacctcggctaggtccttctcccccttgcctacccgctcgaggtggatcttcaaccatttcctacccatggccgcatggcccggtccctccatcttttgaccctcgtcctcttccccaccgatcccaaccccacctgatccactggccgactgactctgagcctgagctgcttttaaagccttttgttccgctgcatatcgggctttggcttctcgctttttagcattctttgatggtttcttggagtcgtcttctgcctccacaacaggagcctcgcccgcacctgtctgaccagtcagaggagcctcttgagttttagatccttcttcctcgacgcccttgtctttgacttgtacggtttgcagcttctcgacgacctctttctcccgcttccattcggcactccccggcaccccagctgctgcgccctgtctactcggatcaatcttgtcatctttttcctcttgcggacgaggtaccgtactcgtccccaacgagtgtttcgacgcaaccaagagttcggtgggggagagtgcagaaataaggatgaggcagccgttggatttgtaggtgaggtggtaaggcggggcggtatgacgttgaagggcgtcccactgcgagtcagaggaagccgtacggggtcattatccagccgggcgaattagcgagaagaggagtaggaggagtttgccaggaaaacttgccttggtccaatcgacctccccgatattgaaaaacttgtcatacccccgcccgacgatcctctcccccttctgatccatcgtacgcggcttgtcatccggtagagaataatcctcgttggcggtgaacagtcctctcgccaacgtagggaatggacaatctgcacgtcgataatgatgttcgctcatcttccaactagtgatgtacagcttgttctcgtcctcctcgtaaggccattcaggggtgacctcgtcatcgccgaggacgacatcggccttggaggtggaagcgactggttgttcatggtcttccggctgagcgaacgctcctcccctggaatagatgtgaacgttggagctgacgagctttttgccggctcgtgcttgtaggttttgcaaggatgagatgagggaagggacgtcgggaggtgagaacctggctcttttggtggtgagcgggagggacgacgtggtcgacatgatgaatctttccagcgccagcgatgatcgtaatcccttgtaggcctatgagctgtataggatataggacctagtgaacgatgcagttatagtatctttttccatcgacgaatggttgtgtgttcagcttcgagttgcactttttggcgctaaaaatgtcgacaagtggatgacgacagagtggtttagctaggtaaaatcatgggtataggtcatgtaggtaggtatacatgttcacatctttcatcagcaactcatagagacctctctaatctgtaactagtcagtagtatcggcaacgcaggaccgatcgaaatgactggcgaatacaccgaatcggcctcgtcgatcacgatccacgagctactcatcaccctgtccaacgggatcggtctctcggccttttccctaccagaccagccgtgtcaagtactcgtcaccgtcacatgccatctcttgccccactgtctcgaaccctcaccggcggacaaggatggtgtggtcgatgattgggatactctagggctgggcaagagcgtcaactattccgcactaggaaaatccctctcgaaacgcctgaccgaggccgctgctaacgttacgggcgggcaaggggaacgaatcggatccctagaagacttgctccgagtcgccgtcttacacatcgcagaggaatacccatcgagcttgacaaagctggacgttaagatcgagagacgacgagcgctgttgttcgccgagagcgtctccgtctttaccagcgtggacctgatctacccccccacgcaaggagttcgagatccggttgcactcaatcatacgagactggagacaaggacgcggatcgtcaagatccatggaattcaagccgacacggtcgtcggtctgaacccgcacgagaggatcgaaaaacagaggttggagctggacgtcgagctggatctctacgagctgttcgacggtcaagagggccaggcgtttgattacaagtcgttggggatcactgcgcatgaggtatgtaccacgatatcatcttctccgcctctttatccgaatcatcagtatcggggtatctgattcggcgctgacgatcgttgcgggagatagtacctcttgacgacctctttcaagacgctcgaatccctcgcccataatctcgtgcatcacctcctcctccggatccctacgtcgcccgcgcgaccatacaaccccgattccatacgctctgaatctgaatccgcacctcgaactatcccatcgagcttttccaagaagaaggacgtccggctcgaggtccagatcagaaagcccgcggcgatcgcgttcgccaaatgtcccagtatcgagatgagcaggacgttgagagattacgaggaggactcccacgacccgagtaataatgttgacgctgtgccgtcacaagacgtagaggagttgactggaagagaaattccagagccagaggcacagccattgatacctgctatgcgtggcattcccaccccggccgcatcgtcgtctgcttccatctcggaatgcgggcacgaccaccctgggccatgtggcgccacgggatctaccagcaagaccaccaccgagtcttccaggccgaatgtactggcttacatcgcgatcggtaccaacctaggggaccggatcgggaacatcaaagcggccacgcagcaactcgcgagggtacaggagctactggcggagaaacgcgagatcgaggtttcttcacgggaagcgggggaagaggacgagtacgatgagagggggtatgtgcgggtgaaacggacgagtaggttgtatgaaagtcggccgatgtacgtgctcgatcagggggaattcattaatggcgtcatcgaggtcagtgccacgtctcacacgagcgtctcatagattccacagatgctgataatccgaatgccttcactcgtgccagatcgagacgaacctatccccgctctccctcctgctccacctgaaacggatcgagaaccacctcggccgagtcaagacgcttgtgaacggtcccaggctcatcgacctcgacctcacgttttacggagaacagagcgtcagcatcggagaaaagggcgatcaagaggggcgatggggagtcaagggtgctggatggctggaagtccctcattgggccgtaggggagagggagttcgtcctgaggcctcttgtcgagtgagtgggtgctcgagctcataccgtgatggctcgaatgacgtggttgacatccggctggtatcgtagcctgaaccccgctttgattcacccgacgtatgggaagaccgtgctcgacctgctcaacttgttgcaagatccgacccaacctccagcgctcaaccctatcatcccgttcccgttgcacagtgaaccgctgcagtgtcacacctatcgaccgctcgtcatggggatcctcaatgtcacacccgactcgttctcggatggatcggccgcccgggtcggaagtaataggctcaagggggaggatgacgacgacgacgaggagaacgaggacggattgacggaagaggcgagggaacaggcctggcttgcccatgtcctcacgctggccaaagcactcgtagattccggagccgatattctggatatcggaggcatgtctacccgtcccggtgtcaaggatacggacgtgaccgtcgaagaggaactcgcccgtgtcgtccccgtcatccaggccattcgtttggagggcctgaccgtacccatctcggtcgacacgttccgcccacaagtcgccgcgcgcgcggtcgaagccggagcgagttgcgtgaacgacgtcagaggtggcagggaggacggcatgttgaagacgatggccgagctcgaatgccccatcgtcctcatgcattcgagaggggattcggtcgggatgctgaaagccgagtctaaagactattctggactcggtggagtggtcgaaggggtgaaacgagagctcatggacctggtggagagggccgaggaggcaggagtgagacggtggaacatcatcctcgaccccggtatcgggttcgcgaaaacacatcaagacaacctcttgctcttgaaatccctacctcttttattcggcttagactccccgctagcgccgttcgcccacctggtaggcgcttcgagaaagggtttcatcgggaccgtcctcgatcgtcccgaccctatgcagagggaattcgggaacgccgcgatcaatgccaagtgcacgatgagcggcgtggtcgacgtcttgagggtgcacgaagtgaaaccggccaaggatgtggtcaagatgatgagcgcgatcgagattgcctgagatgggagataggctcgtgattcgagaacgttgtacagtgtcgtataaattgcatagtgattacatggaagttgaaaattcgaaggctttccatctttgccgccgtaccatccaaaacctgtcagatcgtcgacgtcgagtgatttgtgtaccaagaccggttcctcgctctcgttgcgataggtttatccatgcaaagtccgatcttcgtccaccatcatgtgcatacttgggtcctgcgtagaaacaggcccctgtccgattgatctggatcggatgaagatatgacggatcaaagcgctacttgatggacgcgggagaataatcaattcgaggaactctagacgcgtggacgtttcatctgatcgacggggatataaggaacgatcccgatcaaacgaataatcgtagagggccacgtgaccgggttcatcgacctgcgagcgtccgtgccatgtcaaagcttgcttcactgtctttaccttggccgcctgatctgatcctctttgctgcagagtagggggtaccatcacatggtgacatcagatgtagttaaggattgcatcacgtgacgtgaccgattttcgataacgagaggttgcggatacaaaatggatgacatcggaagcggatgcaactctctctccagagtggttgtcccccgttttgcatccaccgaacctccaggtcgaccgtgagactgaccatcgtcactactgctacacctatccatacacacctcgatcgacctcgtaccctcgtcctagagtttacacctcgtcaatggctaggctaatcgacgtcttgctcatcggatgatcagccgttcataatcccccttccctccactaccactcctctcagcctcgagctcgatcgccgggatacaaagcaacctcctcccccgacagcgtcccctctagaggtcattttcccgcacagacctcacctcgtccgagctcatccatcggaaccacacactcaaactctggcttctcgtcaggataggtccctcgaccaaggctcgtacttgtatcactgtcgttcggatctgcaggtcggctacgtctaggatacgaccgaagaccctcggagctaaggaaccgagccgggtgagtgcaacgcgcagcgacgttaagccgtgtcgaaccggaaagagaaggacgccggccaagcagctggcataccgagcttgaaagagtagagtagctgacgatggtcccccttctccatcccctgtgaatttagccatcaaggagcccgctttcccgcttcctccacatcatcgcgagaagagtacctcgagatcgcgtcccccggacatcggttattcgacagtaggctcgatcggccattaaaaggtatcaagaccagctgtaaatactatcgcgttatcaacccggtggtcacatccgtattcgcgtgaagacggtcgaccggtacgttcgatccccacttaccaggcttcccacaacgtcacccacccccgctccccttcttcctcacgactgacgactacacgtgatactcacaccagacggaaaaccgagaagactccctcagatccgtctaaccgggctgtatcgaatctctgcccccccttttgatccatcttcaggacgagaacgagcagcaagatgaaccctgcaggaggtccgagggaagatagaccgaggttcgggtcagagtcccggtcaggtgcaggtgctagtgctactgcaggtgcggatgcaggtgcaggtgcaggtgcggtaggaggctcgaacgggacttctgaaacgaccctcgcagctcattgggaggcggggaaagaaggttcggcagcgatgcaaggtcctgcgtctgcatctgcatctgggggcggggcggccggttcgaacggaggtgttggcaacaacaatatcaatacgagtaccaatacgaataacaacaacaacaacaataatgggaatgggagtagtagtggcagtgccgctggtttgggtggacagcagagtcaaggtgcaggacaagctcaggctcaggctcaagttcagacgtcatctcaacgcccgacaagtcaaggtcaaggccaaaatcaaggtgcacattctctaggagccggcttggcccctccttccggatcggcatacggaaactctccagctcactcgacgacctactcgagggcttcctctgccgtcgctccaggactcggaggaccctccaacccggcaggtccttctccgaatcccaacctccatcctaatcccagccccaataccgggcacaatccgatcaatacgccgagttccaactcggccgcccagaatctggggcaaagttcgggtcagcctctagccggtccggcacaaggtcaatctcagggtcagaggaaatccccgacgttgggagagtccaagatggacgcggccagtatcgggctcgctggcctctctgctggatcggcgggtgcggctcaggcgggacctctagccggttcaaatgggggacgaggcgaccctgtaggccagtccgtccctggtggatcgggcaggatggggtctccctctgcccaaaccccgggacaggggcaaatggctcaacaacccatcggaccaggtcaaactccaggtcaaccgcaatctcaatctcaaggccaggtgcaagcttcggctcagggacatgccccgatggaagtggacgcgagagcatccacgacccccgggttcggatcaacgacgaatcgagctggatcgccggtcgcttcccccgcaggagcctcgggagcgggaggagccgggtctgcagctggagccggggcgggcgcgggtgcgggcggggcggcttataggcccttgaatgtccgggacgctttgagttatttggaccaggtcaaggtgggtcgaatttagaggtttcggatgatgacgtgatgccccttcgaggaggtggggaaagaggatctgatcctgctccgtttcgcatggctcgtaggtccaattcgccgatcaaccggacgtgtacaatcggttcttggacgttatgaaagagttcaagggtcagacgtgagtcggctttggattccacatccggccgtcttctttaccctcgcgctgatggaccggtcttgtatcgacacacagaatcgacactcccggggtcatcgaccgagtatcgaccttgttccattatcacccctccctcatccaggggttcaatacgttcttgccccccggttacagaatcgaatgctacacgtcgaccgatccacaagagtttcccgtctcccttcgtggcgatccagcgtttggcaagtcgggccaagggttgatgatgatctcggtgacgacgccgagcgggacggtcaaccagatcccaggtggtttcgccgctgccgagagggagaggaggaccaaggagcgcgagttggccgctagggaagaaagggatcgcgagcgcgagagagatgccaggagggagagggagatgaggggcaaacaaccggtcatcggaggcgccagtggtgctgggtctggccccgcgggtggagatcgggctggagctggggatccatgggatgcgcagcgtcgatcgcaggatgatcgggcttaccgcagggcgacagaggatgacgagctcgacaggcgggagagggactccagggctcaacagggtcaggctggggatgtcggtaaacagggtgcagacccgggcgcgcaaggttctggctacatgcatcaatcgtcattcccggccgccgaagccgctgccggatacccacccgcttctaggccccggcgtttcttcgaggacgagatcaaaggttacaaaggtcccgcttcccggatcatggatgctcccgaggatatgaggatgggcaacaaccttccccagttgcagcctctcgacctgcctcgttcggtcggggtggaacgggtgggcgccgcaaacggtggaccaagcggaccttcgacgcctggtgcggctcaattgctcgcgagcggaatgaacacgcaaggcgcgagggagcaggaatccgctcaagcggtcgctcttgaacagcaacagcagcaggcagctcttcaacagtatcctcccgctgggaacggtaacatgcctggtagaatgcaacagcagctccgcgatgtgcacgaacgtcccgcccagatggtcgagttcaatcatgcgatcgcctttgtcaacaagatcaagaacaggtttgccgccgacccagagacgtacaagcagttcttggagatactgcagacctatcaaaaggagacgaaagatatcaacgaggtgagtcactagtccgcttgcggcacaatccctgtctcgcttgctgatgtgcaattgtctactacaggtctactcgcaggtcacgatcctgtttgataacgcgccggacctccttgaagagttttcccaatttttgccgggcgccgatgggcagcaaggctccggcggtttgttcagcggagacctgtttggtggtggtgggatcgctcctgccggagcacaagcagctcctgcgcctcaggctggtgccgaaaaaggcaaacgtggagccaaggctgagaaggagatcaaggaggctgcggcacctgctgcgaacgccgcgggggggtcacgcaaaaagcgggctgctgacaaggatggcaaaggtggtgcaagagtgagtagaggccaacttgccttcagctgcgtgtcggtgctgatgaatcttcgcgcccacagagcaagaagagcaaggtcgcccatcgtgatgcgacgccggccgaagagatctccaacaccggcccgccctcttcgcaacctcctaccgggcccagcacacttgccagtcagaacgaagtcgtctttttcgaacgagtcaagaagcagatcgacgatcgggtcacgtatcacgaattcctgaagctcttgaacatgtttgccaacgacattatcgacaccaagacgctcgtcgagcgcgctgccctgttcctcggcggcgaccagaacgatctgttccgcgagttcaaggcgctcgtcggatgggctcaggtcaacgtggacggtcagggtcagatctcgaacccgccaactgggatgatcgtcctcgatcctctcggggtcgccgagaatatccccatgctccagcgtcccaaggttgacctcaacaatcagcgtgctagcggaccgagttaccggaagctgcccaaatcggtgagttacatgtcaggatctcacgcaagatgacgactgatccacatcatcgtctcatacccaggaggtcaatttggcttgttcaggtcgcgaccccatgtgctgggaggtactcaacgacgaatgggtatcgcaccccacttgggcatctgaagacgcggtgccttcagcggctcataaaaggaacgcttacgaggaagctcttcacaagaccgaagaggaacgtcacgaatacgattatcacatcgaggccaacatccgcaccatcgccttgctcgagccgctcaatgcccgaatcaaagagatggacgagctcgaaaaggctcagtggaaactgaaacccggtcttggcggacagagcaagtcgatttaccagcgaatcctaaaaaagatttacggacgagagcagggtctcgaagtcattgcggctctgcacgaacagcccgctatggctatcccggtcgtcctcgctcgtctcaagcaaaaggatgaagagtggaaaaaggctcaacgcgagtggaacaaagtctggcgagaagtggacgcgaagaacttttacaaatccctcgatcaccaaggcgtcgtcttcaaggccaacgacaaaaaggcgttggcagccaagaccctaatcgcagaggtcgaagcgcttcgtcaagagcaatcgcaaaaacaagccgccgcaggcgaagccacgcaactcgctggattcgagcggggtcagtacaagttttctatcgaggacattgactgcctacaggacgccttgaagctgtccttttcgtacctggatcgaatgacattggcggctgccgatcgcgaccgggtcgagtcttttattcgcgcctttattccgacattcttccagttcgacccgcaagagtatgacgctacgtttggcgagctcgccaatgggaccagtgaggaggatggtagtgagctcggggatggtatgagcgacgccggtagtttgccggacgacgatgatcgttcgagcactgccggaggcaggaaagggcgaggcaaaggtgatctaaggacgaaattgctccgtcaagtggtcgaggccggggaaaagcgcggcaagcgcgcagggtccgccacacccgcacctccagaaacctcgaccgagggagacaatgtcaatggcgacgtcgtcatggccgatggcgatgtcagtgttgacgcagctgtggccgctgaagagagcgtccctgaagacgaggacgttgcggctagccgggccgccctacaagaaggcgaaaagacgtgggtcaatgtcgaagcgactgcttcagaagcggaaaccgaacctatcaagaagactccccgaaggcacgtcttttttggcaacaaccactacttttgcttcttccggatgttgcaggtcggttctcaatcttgtcttttaggtgcgcgaaaaattgtccgttactgatgcagatagccgtcccgacagatcctgtattcgcgactgaagacgttcaaagatctcgcctcgggcctgtctgcaaatgccgctggctaccaacccgtcaatccgatggccaagcagctcggtctcaccgaccctgccgccgccattttggaagagggtgccaaccctgcgtctcacttttaccctcacctgctcgatcagtgtgaaaagcttttcgacggcgagattgacacgccaacgttcgaggagactgtcaggtacatgtacgggatccgggcttatcccgcctttacgctggacaaggtcgtcgcgggagtgatcaagcattgtcaaaacatcttgaccgacggcaagagtcaggagctgtacgcgttgttacaggcggatcgcaagtacgaaggcggccgatctacgaggcaacagatcgcttaccgggtcgaggcggaaaagacgctcgcacccgaggagaacgtgttcaagatcgaatgggtaggttcagctcggaagcgggcgaccggacgtggtgactcatggttcgatttcgcgggcacgcttttcagctcggcacgtccaagcgactacggattatcttgctcgccaaggaggacgtcactaccgacgatatacagactgccgagcaacagtgggaggcttatatagatagctttacgctggcacacccgaccgagggtctcgggttcgccgtcgagccgcctttcctcagaaggtgagtctgtagaatgcggagtggaacggtgggatcgagctgacgggatgcaaactatagaaacttggtcgagctggaggatcgaggcgacgaagaggcacagagcgggatggccgtcaagatatcgctggaacggtatcgaatgttctttgtccctggtgagtcgcgtcgaggtctccatcggtttattcgtccagtcggctgagtccgtccacgttgcacagggaccgaggactactatcaccgccatgtgaaaccggtcgaagaggaagtcgttatcaaggccgccgcgtatgaccgtcatcgagaggccaagaagagcgagatgatcaaatgggcggacggactcgtgcagaaaaaggacgttgtcatggaggaagcgtgatcagagagaatcttgggaggcgagtctggagcataggtgtgacggtggtgctgtaaggagaggggggttttgagggtagacgagtactggtacacgcgctgtttggtttcgctttcgatctcgcacgatcgactcgttcgatggattccgattagtcctcgaggttgtaaaaacacgtctatagtttgctctcttccgtctttgattcttgtatgcgacatgcatgagcatggcgaattacttgatggttattgagcttgtcgatccatcgtatagggtgtgtgatcgatgttttcgatctctatggcgccaatcaaaagcgcaaaacacgatttacgcgcggagtcgaaccctttggatcatattcacttcacttcacccgccaaaggttcgatagcgtcgacgatgatgtagagatcaaggtcggacaacgatagataccatctcatctactctaggctctctcggcaatctcaaatatacccaaaaagactctacccagtcgattcccggccgagtcatccggtcactagatcccgcacgatggcctcttctcgatcagcattctcggcagtcacatgctcgacccgtagtatcccgctacgtcgactcgccctcgctcgaaatctcacgacgacctcgatccgcctatccaacgtcgcctcgacataccgtaatccggcgctggatcccctgtatcgacctgatttcccggaaaacttgcccatcccacgatcggcaatggcggctcttggggctagactagaattgagcaaaggtggagaagacaaggtcttggtctgcctgacggatcggagttgggacgagaccaaggtcaaatcgcttcgtcggcctgtcggtgaagacggatcaacgagctcgacgacggtgcagggggataccaccgtcgtgacgtccggaccgtcctcgtcgacaacatcaccgaacaatcaactcctctcctccctcggcaactccctcctcggactcttcacctcggaacacctctccaccctctacccgaaccttcctacccgggtactgaaatccagcgtatccgcttactgcggtccatcggcatgtgcgagcgtcggtcgagagttgggcgtgggcgtgaacgtctcgagctcgcaagggagcggcaagaccaagttgggcaggtcggaagggttgagggtgagatgggtcagggatcaagaaggagcggggaggagaggatgggaagacgtcatggcggatagcgtcagggcgttggtcggcctggtctaccaagaacgggtgagcctagcacgaccgggggagccgagtatcccggtgtttcccgttctcgatgctgaaaccgtattacacttttcttcttacaacagggaatgaacgccgctcgacagtttgtgcacaaccagttcttgacccggcatgtggacgtggcgggcatgttgaatttcagaaacccaaagcacgtcttgggcgtcgagatgaggcgattaggtctgggagctgggatcgagtcgaggtgagtcccgaagtccagagcgacgtcctctcaaaacaaccatcgagagggatgactgatcgacgaacgtctctctctctctctctctctctctcgcgtcacaggctattggcggaatccgggcgacattccatctcgcccatcttcaacgtcgggctcttcctcccctctggcttgaaattagccgagggatccggttcttccctgaagatggccgaacatcgagcttgcgtcaacgcgctcacctcgatctacctcgtcaggaaagagtttgtcacgaaccccgacgagctcgaacagggggacgaggcggggttaccgacgagcgtccatgcggatcgaccgatgaggtttgaaaggggaggagaggaggaaaaggcttttaggggcaacgtggatgtcgggtcaggggaaggcgtgtttgggacgagcgagggcaagagaaagtggagaggcggcaagaaggtgtaggcgtggcgtcgatgtgcgcacgaggcatatgggttggaggatcatgtcattgacgatcatcaactaggtgatgataaagagacgataatgcgtcggaggtcgtttgagccgtcgcgtcctgttctatacaatcgcgacgtcgagacgggactttgccaaagctcttacagcgcgacacgtcttatgactccagttcacgtcgtcgcaggataccctttttacgactggttgaccatcggttcgtgtgattgatgttcttgcgaaggctcgatggtatggcagggcaagggggaagtgtgataagatgcacaagacgtcgacatgaaatgacatgacctgacctggtgattgtgtgtgtttatgcgcgccttgctcccttctctcacgcgtccccccccccctacctagctttggttgctcgatgaggtccagttgaggtcaaggtcgacatctcgacagacatcatatggatacagggtaacacatgtaccgcccatccgatcaaggtacaacctcgtcaggtcattcgtctctccgtcgtcatggaacaagtctacctggaagaccccagcgtcttgcaggatcatcaccatcatcaccatcaacacgctcaccattcacacgaactcgtggatcctaccctggccagcgtgcacctcgatccggataacgaaacggcacacgatgtgtatacgatcgagcataatcagatgggtggtatggatccgcatgaacagggggaaacaggcgtgggcgagttggagatgcatgcggacggtgaacatcaggggcaacacgagttgggggatcatctccaccaacagcagcaacagcagcagcagcagcaacatcaatatcaacaacaggtgcagcaggatcagcagcatcaacaacagacacaatcacaacaagggcaacacctcgagatggaccccgacgtgacgggcttggatcatgacgtcctggcggaagctagctcgagttaccatacccacctcgccgggctcgacgagattgagaaaccgaggataagtcacaatcggaatccaggcggcaagaatcagtatggtaatccaggtgagtgatagagtcggggtggtcgctgttgctgtcgatgtgggagtcatcgtgaagtacgtccgggcgctcatcgaggatctcgttggttcatatcgtatcgcatgacatccacgaacggacttgaccttttcgtctgtcctcggctcaccatctccaccgtgatatcggcctgtcacagtggatacggacaagttgagggacattttgagacactacttcaacgtcgaatgtatcaccgaatggaagacagtgctcgcgcggttagaagcggaacatgggatccagatcaagttcgtctctccaaaccccggacaattcatactccaccgttcttgctgactccaaacccatttccgcctttccccctcctcctcctcctgcttgttttttttcccatgaccccaccgtctttgtcacagacgagccacactaggtcgatacctacgtcaattcaacatcggaggttcccgacggatgaactattccaaagactcggccatgccgctcgtggtcgatcatatcagggagaatgacccggggtgcaaagattcgccgacaaagatcatgaaagatctaggcaagaaggggattcatatcaaacggtcagtcggcgcgcaaagggggaggggggaggacagggtttttttttttttaatgatacggcgaccaccgagatctacaccgtctaattcgtcggcagcgtcagatgtgtaataagagacagttcctgggctacgtgaggcgagctttcacttagaacaatattcactgatttcagcctcggatcgactagggccgtgttcgatgcgtacatagtacccacagtcccacgccaaagtcaaatggatccatcggcaacgaaagaagctgtccccagcatgaattaaatcgacatccgaagatcgcgcttttctgccgatgtgtaagatcggtcgcgaacgatgaaagcaggtgacccctcgaagtcctcaaacttcctgaagattgaccatacggtcccagtagtgggtttgggttttacacagcgtacttcttcagcatgcaaatgatgatctttacacggctcatagtggacaacctagtcgttggaatggcgcgtatcacacgccacagacagcagcgagtgacgcatgaagccttatagttactttctccaggagacaggttgcagggtctacatacaatcggacgtataggttcctgaatattgacgactttacttgaagcagtcctaggttatgtattgggggtgtactaacttgagaatcgctacttcgatccctttcagacatgtactggcgatctttagcgggcttgcctaccgacgttccacctccgtttgcagtgtcttaaggcgatgacgaagtcggtgcactcgaagctgatgtcgcaacctcgatgtcattctcttcgttgcatcgcatagtcttctataacagggtcgcgatgtgcgtgcgagttctagcagcctctttggtgtcacccatggcttcttcggagcggctgcgaaaatcgtgttgttcaaacacatatccttctaatcaaggccttggtcaaaactaccggctgtccaacgcacagtagagcttgccaggcaggcacccatttgggattccccttacaagcgactttcaacagcccgttacatgtccgtggaaggtctggtggttcgactattttatccgctgccttcgccatgtcgatctgcaggagaaggcagaggctgattgattgtggcgcttatgaaaacgtcatttgatcagccaatttactaaagctttgaagccgaggtagaagacacgcaacacgaacccgaattcgaagtgatagatccagtccgaagtagctggcgtttggtccaagtccaaagaatcccatacctccgcggcggcacagactttgcctgactcgcgaagaaatcgcctgcaagagggatttgaagccaaaatcagcgccccactgggcaatcgagcggtctctatagcggaagaaacgcacgctgtctttcccgccacctctggactgagcttttggatagtctggaaccccgcgttcttggctgtgagcatgatatcggttcatctgctcgcaggtttaatcagtttgattggagactgagcacgagtgtgcgacaacacgcaccgcttgcagagaagcatactgggatcttgcggtctgaaacgcaaagcgcgatcgaaatcttcttttgactcttgcaacttgccgacgtgcaatcgggatagactgtgtgtcacgcgagctcaaatcaaaggtgtcgaagagatgcacgtgcgcctagctgccgcaacttacccctgtgtcgtccaggtcccagcggtgggcaaagcaccttcccatgctggattgactgtcaatgctgcttcgtaacatatccgggccacccggtcaccttcgtccgagagtttgtcgtctcggtcaagcggaccatcaggccaccaaacttgatgactacggatcgattcagtgttgcacgttacggtgagagccatccacaaattgagagccggtggcggactgaccctatgtctgcatatgctagggagacctctggagcgctccatccgcttcttttggctacatccctgtggcgagacaatagaattagacatatacgctgtgcaatataggacgtgcgcttctgaggaattttgaacttgcgatgcgagccactgctcatatgagccgaatttcattgtctttgctacgtatgtgcagagcacctgccaagcttcgtaatgacgacccatattcatataactgtcgctgcgatccagcgacagggaaattgagaattcagcagccgaatactggcggttcatgcctccgattccggctcacaccaagggaagaaacgccccttgtgtacccactgtgtatccttgacgaatagccacctcgagataaatcgcggcgatttgaaaagcgtttttctccagatatataacttgcctattagaagcagttgcaacggaattcgacgcaagagcgattaaccgaatatcaggagactgactgacccgatgaacatcgcatccagtgcgggcaaatcgttcgctagccgtccatgtatatgcggatcgtcacttgcacttcggatgaatcatttatccaacgcttcgtcaatctcggctactagaagtcttcttaaatcctcaccttgcagccgtcctggcacgggactgtaccgacaactggtacatatgatcgctcagagaagagttaagcttatcaaatccttgttgcacttcgaaacgggtttgagagaattgcgtctgcatatcctgatgcatcttggtgacgtttcgggccgagtagataccaagacctatctgtgtgtcggcaatcaaacatcactaacggtacttctgcaagtaagatcatgtcatgactcacagccaattggcgctccactttttcttctcgcctcaacagcgtttctaactgatgatgcacttcggggtctgtgtagtctccgatcgtctgagagaaggtttcgacgtcgcgcgcgagactggaaatcaagtgctcgtcagatccgggtacatatataccattcaggaagacagtgatgggacacgttgacttgcagtaataccgcgagcagctcctgatataaatcgatctgaatggctgcttcgtccaccagggaacgtttcaatagagacgtgagtgatcccagtgattccatcaggctcgagacgcgatcacttgtgaaacgttgcgtctgttgattcgcggtcctcgctgcgatcacctgtcccgttgggtcttttagctgtcgatgtcgagcttttgctgttatgatcatctcggctgcctctttgaagcagctgataatcgccggaccctgagtgagcaggagacatccgatactgatagggtcgcacatcttcgaacgctgataaagtctacgaaatcgatcagagctgaaggcagtgagagactgctcgacccaaggggagatggtatgattggcttataaagaattctcttctgcatgatgacatagaagaggtgggacgggttctcagatacgtcagatgatccgtgcacgacatgttcgacaagtgggtctgtctcgaacagtacagctctgcatatgttgcgtgtgaaccgttaaggttcgctttacacatccgtgtcctgtgattacgaggtgaaatatcgtgtgaggtgctatccggaggttgtcggtcgggcggacgggcgatgaggcaagtgctggaaccttacattttcaaccacgttaaatgttaacatatttttgcttcctgacctcccatgcacggaacgcggatgtgacagagggagacgcgccgcgcaggaatgcgcaggaaagagtaaaacactggggagagatgagatcgccctggatggagaacggcactgctggtgagagactgtattcagctgatctcgggacaatttcctggagagaaagagtcgctttgcaaggaaccttcttcttttcacttgttcacgggatcacaggctgatcgattgaggggatcgaacagtccatcgcggttagtgtgccaggtaccggatcagcggcccaaaaaaaactcgcagctgtcgagtcttcggcctgttgacctgatatccgatttcgggcttggctatcgacaagctgggcagggagactgcaagattattgcgtccgacacttacgaggtgcaatctatggatgattttgggagttacacaccacgagatgatcaagttacggtgagcaataggatttcatcggcgtcacggttgtcgaactaggtatgaagcagcgtttttggtcaaacagacaaatgtcactagctcaattctggcggaatgcccgctttctcagtccttgtggttgggcaccaacacactcctgaaccgagcttttccgctgatcatactgcaaggacaaggcagtttagtaccaatgccctccagcgaggacggtatccgacttacgcctcataagcctcctcggccttctcgagcgggtatttctcgacgtagcacttgatgtcttgctcaatgcagaatttgatcgtctcggaagagtcctgcggcgtcccggacgggaaaccacgaactttaagccgcttctgaatcatgggcatggagggaatggcgagatcctcgcccaagacggccaagatgagcagcgttccatttacgttcaacccgccaatcaacttcttgatgacatcggcgttaggggcagtgcacatgatcaagtcagctccaccaagcttgttgagagcttcagcttgatcttccttggacccgtcaacgtagacgtgggcgccgagctccttggcaagttccctcttggagtcggacgacgaaagggcgatagttttgaaaccgctcttggcagcgaattgaactcccaaatggctagtcatcggagatacgtctgatcagcgtctttggaccatcattctgttctaagcagatcgtacccgagacctccgagaccttggacggcaacaaccgctcccggctggagacccatgttcctcaaagagttctgagagtgtgctagatcacgtcagtgagggtctgcgtttcggaaaagggcaactcacgaaagtcgtgactcccgaacagaacaagggagcttgggcggggtcaagctctttggggaccttggtcacgccggtaaagtcgagcgtcacatactcggcatatccgccgtccgtcatgatcccattgatgccctcgttgacgcaagtgacatagtcgcctacgaaactagtttcagattcgaatgttgttcgcaaggcctagcgtcaaaaacttacccttggcgcattggctgaacgcgacataagaccaaataagcacgtttccccctgagcgaagaccaagcctgtgccgatgacactcacacgcaggccaggcagttggacccgtgccagcccgagccgacgcgatctcccactttgaacgcttccacgcccgaaccgaccgcgacgacgtcaccgataatctgagtcagaagcagggctcacttcagctcttagtagctgtacgtcacgtggacagttgacttgtcgccagatgaggcccacctcatgtcctgggatacgaggcaacacaggcataatttcctgcttgacaatgtcgtcgctgtggcaaactttgaacgcggagaggcgagtcagatattgaaacgtctagcatcttggccgagaacgtaccgccgcaagcgaggaccttgacgacgacctgacgctttccgggctccttcatctccacatctatcatctcgaaaggcttgcccttctccttctgctggacggccttgtaagtcttagggagagacattttatggatagttgatcggatgagctctaagtgggtcagcacgagtgaatgcagatacctctgtgaatctgtagtcatatatttaggaggcaggagtgttccaaatgtgtatatatatgcgcgtgcgtgtcttgtaggtgatcaggtgctcaggtgagtgtgtatacgtcatgcgatcatgcagctcaccccggcgtttgatcaagaggtggagggctgaaacggaagcaaaacagcgattgatcgacctatcgaacacgatgataacggaactctgtcatccctttcatccacgtcatcataaaagttcaacgaaggatgcaagatggtctttacaatttggacgaatactagacagataaaggttaacatcatgtcagcgaatgaagagaccatgaggatcgagcgacactcacatcgtagaatcccctaccgctcttccggccgaggcgaccctcctcgatcatcttctgcatcagagggctaggttctaccagcttcttgtcaattagaccttggtcggccttgtcctgccatccagagacaatgtgcgaagccgtgtccaggccgataaagtcaagcagcttgaaaggctatcacatggtgcggatcaaggttctgtgtcagcgaagaaccctgttgggatctatatccagcaaatagcttacacccatagctggaaagataacagatttgtttaattctagcttgtccgatactacctaagcacgtgaaactcacgatgacccgttccgagctccatggcttggtcgatatcctctgcagtggcctctcccctctcgagcatacgtactgattccactatagaatgatatcgagtatagcacctgctcagcaagttgcgatccttgtccgagtctgacccctgtgagacctactcaggtaaggaatcaagagtcggttcacgatgaatctagcatggtcgtaatcgggtaagcgcgggtacgacttggggttcatcgttcagttggctgcttacccgggagtatcgaggcagtttacggggctcttgcccatcctggccgtaatcgccaagaggatctcgatgatttccgggtccgtctttggagccttgatgatctcgaccaaacgcatggccggtacaggttgcatgaagtgcacaccggcgaatctgcgatgacaagcagacgaaataaattatacgatacttgcatgtgggtcacgtcaccgtccccagctcaccgggttcgtcggtcttcggagcacttggccgaaatttcggcgaccgacaaagccgacgtgttgctagcgaaaatacaatccttgctgtcgggtcacaaataaaaacgttatcaaaggctatccccagcggtcacggcgagaagagggtaaccatgcttacttggccttagagtcgaggaaagcgaacaggtcctgtttgatcttgaggttctcaataatggcctcgatgaccaggtcggcgttctgtacggcttcagagctaaagccgcgtgccgattcgattcgtacgataagctatctgaatggtaccgccgccaaagatgttcgacagggtggactcacgcatcctgggtggtcgtgatcctctccaagacttgctgcttccaatcctcctcgctcttctccgccttgggtgccatttttttggccactcgagcgagggatttgtggataatgttcatcccgtttctgtatgttcacgtaggatcactctctgtgagaattgaggcgttctggcagggtccggcgcgctcaaggcttactggagcgctttctgaggtacagtcggatcgtgcagcaggtcagcgtcgcgattaagcgtccccccatgtttctgttttcgctaaagagacttacttcggtaacatccgtcatgaccacctgatgaaccgaggtcgatcgagggcggtcagtcccttaacataatctgcggtacagccgggtatgaggggaaacacctaccttgtacccgcttgtagcggccacctggacgataccggagcctatcccaaactcgtgcatgtaagtcacgagaatgccagtccgaattgtacttgcagctttgactcacccatcaagccagctccgaacacggtgatgttcttgaccttgtcggccttggagtcgtccggtttcgaggtcgcgtacattcgtcgactggacatgatggtggctggggcggaacgagcgagagcggcctgtgcaaccggacgagacaatagagttgttctggacaacattttttgccgacgagtgggaaattggttggagtggaagcgtgaacaaggcaagaaatatggtaaatgtcgattgctagtgtgatcatacacttgtgtgctcgtgacgattccatgctcctgcacctcccggctacaataaccggtaaattacatccgattgcggaagtaattgagattatttgattccgatagctaaggtcaccttaggtaagctcaaaagtcgtcgagaaagatggtagagactatgaggccgggcatgagggcatggttgagatgactctttcttcttgatatgcagcatacatcgcttgaccgcttggtctcatcatagtgggatctcttggcacaaccacaaccattacattgtgacatcttgacgacgaaaattgccatgaacgtggactttgacgatgactttgatgcggtagattccctcaacaacctcgaacaaacgtgagccggaatcgtcggcttacccgtcacgaccgaggagctcacacttgttatacgtgaccacagctattatcaacagggctacaaagacggtttcgaccatggccggctacatggattgttcgaaggcagggcgattggtcaagagaaggctttcgagatctgggaagaggttggctttatagaagggatcgcgctgttctggcgcaacgttgcagaaaggcaagaaggtggtcagatctcgagcgggaaaaaggttaccgccaggtgagccgggcatcgaagcagcttatatgacaaggacactcctcatcgagcattgtcttttatacgactaacaaagggcccagactcatattcaaaccctgctcaacctgatctcgaccttcccaacggacaacccgaccccggttccggacgaccagcccgaacaggtagagaccgctcaatcgtcagagacggaatcgatcaagtcgaaggaggaacccgatcttgccgtcctcctggagaggatccgggctaggtacaaactgctttgctcctcccttgggatcaggtcccgtctggcagtcgccagtcgacccgaggacgtcccgccgaacggcgcggtcgagacttccggggtcgattcgggaatcgtcatgggcgtggaaggtagcggagtggccaaaggcctggtcgacggagtggacacgcggatgcttcgattctgaaaagggagaccgcgtccccctgccacaactcgccctttcagctcgatcggtccagtatttgggcctctcgccaccgggacgagacattgcaagccgggtttccatcaagcttgaacgacccttttagccttgccgattacaagcatcaccccggtagaggtcaaggcagcaccggtcttggtctacattctgctcggggcctggcgacagctcgacaaaacagcgttggagcttctcttcttacctctcccaggtcaagagggggcgactgttgagaaaagccatgaagcccatgaggggacgagggaagactgaagtcgtgcagatgtaaatcttgcgactgcgacgggatcataagcagactacttgatcgatgaatatggaaagactttcgctgtactgggtgccgtatggaaaaatcgctgtaatcccgttggaagcgtctgatgaaggttgatcgtcgaccgtcatcattgatctatactacaactttggctcctccgtgccaacaataatcatgaccgcatcgtctgtattcatttggctgctcaggtccagagcttgattgttccatcccaactcgctgtcacaagttttgactacaatcgtggtttttcttagtgtcagcgtgcgttgccaaactcgaaggacgacttgattgccgtctgactcacgtgctcgttcggtagccatgcgtggtcgatcacgacctgcttgtgcgcgtgcaacctcttcaagatcttgcctcccttccaatcccaaaagaccatgttaccctgaccgtcaccactggacacgaatcgcccatccggcgagaatccgatcgcgcaagcataaccagcgatagtatgtccggcgaaacgcttttttcggttttgacggaagccgtcggttgaatagacaagaatctggttgtctagagactgagccgcgaaccatttttctacaagcaaataaacgattgacggatcagcgcgatgcgcagttatccgtctacgagagccgactgactgttgggatggaccgtgacagcgggcatcgagtgcatgtacggctctgcgatatacttgatgacgacgggaatatcatagtcccaccctcggatcgtcttgtcgtccgaggtcgtcaagaaccgccggttgttgtccacccaggtgatggtgttgacaggccccaaatgctgatcgtactcttgcgtgatctccttttgcctcaagtcgtactgagggtggatttcatcagtctcgcccgacccgcaaaagtaatcgaacgaagacaccgagacagacctgaataatcttcttgtcctgcataccagccaagaagatgtgctgcttgtcctcgtccgggttaaacttgacacaatgagggatctttccgttcgagaaagcttgaatacattggcctacaacgtaaccatgtttcgatcggattgtcagtcgctgactaatcgaacgaacagtgcggcttgaactgaccagtctcggtatcccacaacttgatctgtcgatcgtaagctgcactcaagaacttggttccatcgttgctgtagcaaatatccttgacagcttttgtgtgacccataaaagtccgcaaaacgtttccttcgtggtagacatcccagagctatgaaagagggaccacagtcagcctctcttcggcgaagtcggggtcgcagcgacggaccttgatcttggtatccatactggcactcaacaagagatgaccgctcttagggaataagcggatggccgaaacagccttggtatgtccggtctattcaatgtgaaccgaataggatcagtttcgtgacaatcggttgcgaatccgatgtatacgacacgccgtacccaggtgtgcgtgcatgtctgagggatgaagctttccacagccggggtatcctcgtccggcttgagattgaccccgagatccgtcgggatgtgcatatacgtccttccagcgtaatcggtaagagattttcctgtttgtcgggaaaggggttagtgacgatgctcgacatgactgtcgaaccgggctaaagggactgaccatggaagacactcttctcctctccagccttcttcatcttctcccgagtggcctcttgtgcctcttctcgacgcctcttctctgctcgccattcctcggcgtcctcctcgagctcttcgacgccttcctccttttcgccctcccaaccagcccacggtcctaggtatgccccttccccatcgaccacgccagcgtcacccttgccttgtcgtttacgcttgttttctcttcgagatccgtgcgttcccttgatattttcgatcaaggcgaagttgttctcggcggcagaagcgacatcgcctacaaaggtggatgaagggtcattggagacggaagaagggttaagagcataaccgtgtactgcaaaagtacgttgctgctgcaggaaagaatgagcgtccatcgactgctcttcgacatgacctaagaatccagccgatagagacatgttaagcaagggaattgtcagacgacgcatagtagcaagggacgtaccagctaaactgttcatgcccttgttctttcttgtatcgaacgggttatcgggtccaagcaccggtcgcatcatgtcatcgtatgagatgttgacgttcatgaccttgtccgtcggccgagtgatcatcgctgtcggggcattgggatcctgaatagatgcaaaacattgttcggcagaggtacaagtggtcgtcgataaaacgcagcactcacctctgccagtacgtccggtgccgccgctacttttacgcttcgatctactcgactcatcttgcctgaagtagctgtcgctccctccaagccatacagatccttcttggcctgctcaatagccgtctcgtcgtcttcatcgtcgtcctcgtcttccggtgcaggtcgaatcgcggccgaggcgtcgtacgtgacggcttgaacttgaacggacgtgtcctcgtcgtcggatgagccgtaacctgataccagtccagacatgattgtgtagattcgttacagatccaaggcgatggtatactgggaacaaagttgggctcgagacgagttgattgaattaccttgaaattggttcagtcgaacgaggtcgaggtcgagcggggggggccaacctgacatttcccgtcgatcgaccggacggacaagtccaacttgaactagaaatcaacctcgttcgaccgcgttgcccgttccgaagattcactactgtaatactttttttcgtaaatctcggacaaggtatatcaggcctcgtggtcaggactgtaggtatatggtatctatagtctattggatacacagaccgcctcgggtaaacaaatttgctatacaacgaaaatgcgaagatgctggtagtagaaggcgtaagggtcccgaagaggtgtaatgcattgtgtcgcttcgcgaacgactctataagaaatatgagatggtctaactcggacagatttctgtttagcgatcttgagaccaagttgttcgaagagagactccttcctcaccttttgcgcctgggcttcggcttgattgggaccgtcccgctcgttctctggtgccgcgtcaaacacgttgaagaatcgtcttcctcctggtgaaatctcgagaatactcgctgcatttccacatctacgagatcgtccgtctgttgagtatttcgcaatcgctcgcgttcgcctcgtcgtgacttacctatagcaataatttggtgcgctccataccgtgctcaaccgatcgtcgtacatgacacaataaccctccatacacagctgatgtgcccgcaatacatgattcatcccgttgatctcgaggaatttcttcacgatggacgatccgaatgtgtaaccagccccacgtggactgatggcgaattcttccttgtctggatctggatctgaccagacgagatccgccatcggtccttcatgtgggatctctgtcgttgtagcgcatttcattaagtcagacatatgatcaggcggggccaaaccctcacgagcctcacctctaaaccggtcgatgaccttgatctggtcgatcgagtgaatagaagggctcaaccctgtagcccatcgagaacacgaagatgaaccttcgtccagtggtcgcgatcccgactcggctgtccgacacgtccgccgactcacctccatgaacgcagaatatccggtcgtcgatgaccacgctcaacgtgaggaaatcgaacatgtcggtgaaatactgccagaccacgggtgatccgtatttccgtacgcattccgtataaaagccgtacgtctgcagggtcaagccgatgaacgggactcggctcagcatccgatgcgtgcgacgacagacagaggcggtgttcattgaacgaaagggacggggcatgaatgcaagtatcgggatcccgctcgtcttctcagttctccgttcttcgtccgaccgcccttccgaaccttctccacccggttccagcccgccacaacccggcacaggatcgaccatatcacggtaaggccgatcctgcaacgcgggtagacgagctgtataccttgatatcgacaaagtgttccatcaggagcggtctttgatggacgctcgatcatcccagccctcgtgagagtgctgggttctccacatttctatatttgacatccttgagacgagcgggtccgggtcctcgtaccatggcgcgttcgtccgttctttccttgatcacatccctcgcgtctagcgacgcgataggggaggacagcagactcacctgggtgacagctctcgtctcgtggttcccccggatcagctggactcgttctggataccgcagcttgaggcatgtcaagagggagatggtttccacggaatgcagacctcgatccacataatcgcctgctcgtcagaaagagtagtgtgtgaacattcggcgatcagtgtcgtatgccccgaggtggagctcaccgagaaagaggtagtttgtctctggtgcgctgcctcccacccggaacgcctcgaggagatcgtaaaactgcctgttcgcgccaggtccacctcggcataagtactatgccctcgaccgtgttctctccgcctccggagactttggacgtacccgtggatgtcaccgacgacggtgacaggtgacgagacgtgtatcacgttgctctcccgcatcaggacctctttcgtcttttcgcaaatctccctcaagagcgcctcgctcaacaggtgcttcttgaacgcttgctcgatacattggtctaaatcgaaaggagccatgcgagagtatttggaacagggatatcttcaggcgcaagtgtgtttgtgtagtcgtgatgtcgtcgatctggatgtcgatgtagatgaggcgaggatcgggaatgtcgtcgtagttgctggcgcgaatcctgtttaggctcgttgtgctagccacgatctcgatcgcagcaatctatgtctatgtcaatttacggacgggcctaccctatgctgatcgtgatgataacgtctatattattggtgctgagcagtactgaagagagatgcatggatgacattttgacttgaattggtagagatgtctttgtacattttccgtttccaaagagacgcgagcgtgacaggtctctgacgtgggagaggaggacgtgagtgacgaatcgataaaaacaggtcgacatccctttcaaccacttcagtcacattttgcacctagacgacccctttgacaagtacggcgattgctcaaggccgtaatctcaggtaagtatattgtgcacctcgtcgagaaactttcgttgttctcgactcgttacgagcagctcggctgaccaggaccgaccctatcacccaatgcaggacttctctctttcaggatgatcttgacgacatggctagctgccctggccttggtcacgaccccgctacaggtcatggcagccaagaaccacgatttcaaactatgccaacaacaatccttctgtcgacgacttcgagggatcgcagatcgagctgacaacgaaggcttcatctcgccctactcgctcgagtctcccgtgacgacgaacgacggcaaggatggtgcctcgtggacttttcctatgaagacatcgttgtacgaggacatcaaattcgaactccggctcgatatcttgaagcaaggcgatggtatcgcacggatccgggtggacgaggtcgggtccaagcttgattggaaacgatacgacgaggctgccaagtgggcgttggtggatgccgaccctgcccgggcggatctcggtagtgtcacgcaaaagacctctcacggtggtcagacaaccacattcacgtatggatctcggggagatctctccttggagatcaaacattcgcctttgctcatcacgttcaagcagggtggggacgtcgtcatggtcatcaacgaaaggaacttgttccacatggagcatttccgcatgagggaagacttctttgtcggcgataacgacaacgccactgttgatgcagcggaaagtggcgatgctcaggtcgtcatgggcggtaaaaaggagaagccggacaccaagtggttcgagggcgagccggacaaggacgctttcgaagaaaggtggaaaacgtgggcggatgccaagccgaaaggtttgtcagaattcttcgcatctgttcctgttgggacacaatagctcatgggattgtggttttcatgtcgttgttactagggcccgagggattctctctagacatcacctttccaggcgccgagcacatctatggtcttgctgaacacgcctcgccgctctccctccgctccacagacggatccggcgagggaacttactctgaaccttaccgtctctacaatgtcgacatcttcgaatatgaggctgattcgcccatgtccctttacggtaacatccccatggttcacgcacagacgaccaagcactcggtcggcgtgctcaacctcgtcggttcggagacgctcgtcgacgtcaaacaccccaagtcgggcgtccagacgcaatggctgtcggagtcggggatcatggacctcttcatcctgcccggacctaaacccaaggatctgtttaggcagtacggcgttttgaccgggaacacgcccatcccgcctctctggtcgatcgcttaccatcagtgccgatggaactatctcgaccagaccgacgtgctcgacgtcaacaggaggttcgacgaggaggatatccccctcgacgtcacctggcttgatatcgagtatgcggccgaacataagtactttgattgggacaagaaacagttccccgatcccgtcatgatgcagaacgaggtcggcgcgttgggacgaaaggtaggatcgcatcttggcctgatgatgctagaaaccaaggtcattaagtagtataccgctctcatcgcttgcagatggtcgccatcgtcgatcctcacatcaaaaaggccgacaacttccgggtctacaaggacgccacggaaaaagacatcatcacaaagcgaaacgacaagacgagcaactttgagggctggtgctggaccgggagcagcgtttgggtcgactttttcaaccccaaaagctggaattggtgggtcgacatgttctcgttcaaggtttgggaagtaagtcgtgcgatcagttggtcgagttgtttcggagaccgtcgacgatagatgatagctgatctggttggtcgcaacctcgtggggcaggattcgaccaaattcttgtatatctggaacgatatgaacgaggtgcgtggcgatcacgacctgtcgacatatgggcggtctctgacctgaccactctttcccctctagccgtccgttttcgatggccccgaaattagtatgcctcgagacaacgttcattacggaggttgggaacaccgagatgtgcacaacattaacggagctactttcgtacgtcgctccaggccgcagttggtgtctagtaatctcttaataaccccgacatgcttgatcttgtagcaaaaagccactttcgacgcattgctcgaacgagagagcccgaagaagcggcccttcgtcttgtcgcggagcttcttccctggatctcagcggtacggagcgatttggtaagtgcgattgacgctcgcagtaaggctttggtggaatctgatcggtgcgcgtatgagcaggaccggtgacaacatgggcacatggggtgagatggcgatgtgattctgctacgtccgatgaagatgctgactaccaaccttgtactgaagaacacatggctggacagaccgccatgctcttgtccctcaatatttgcggcatgaccttctccggaggtgagtttggagtcgcaattcacacaccttaccaatctcaaaacaatgcgctttcccttagccgacgtcggcggattcttcggcaaccctagcgtcgaaatgctcatccgatggtatcaagccggtgccttcatgccgttcttccgtgcccacgcacacatcgatacaaaacgccgagagccgtatctctttgatgagccgtacaagggaatcatgagggatactatcaggcttcgataccaaatgttgccggtctggtacaccgctttccatgagacgagcctgtcgggcgcacccacgatgaggtaagtacccgtgtgagatcggaaactccagatctttcgattgactcgaagtcgggcagaccgcaatactcgatgttcccggaagatccgcttggattcgccatcgatgatcaatactacgttggtgatagcggacttttggtcaagcccatcactacggagggagccgtggacacggtcgtctacctgtcggacaaccaggtaagtcgcagtattgaaacctaccgctcgcatttaagcagcagcctgattctcgatcacgctgcagccgtactacaactacttttcccatcgcatctatccctcctcgaaacgcacgaggcacgtcaaggttccagcaccgctcgagatcttcccggtcttgttgcaaggaggttccatcttgccgattcgcaccagggctcgaaaggcgtcgactttgatgtggcgtgacccattcacccttatcgtcgctgtaggagtggatggtacggcgagtggcaagctctacatcgatgacggcgattcgtacgactatgaggagggacagttcctatggcgagagttcagactggacggatcgggcaaacgctcgacgttgtcgaaccacaatgtggcggcagcgggagagtccaccagcagtctcgcaaagttttcgccctcgagcggtccttgggccgagggcatttcgagcgtccacgtggaacagattgtcgttctcggattgaagagcaaaccaaccgctgttcaggccaacggcatcgatctcgaatggtcttggatcgctggatcatcggcttccgccagtagcgagggcgatgctagcaaactgaccatcaaaagtcccaagctcaagattgtcgacgactggagtatcaccttgtaaatttaatattcatgctcaggatagaatcccctgttccggtcgtcacgcattgcttgcccacgcgccaggcattacctcgccttacgcgagttcaaggtaacatgttggccggtatagcagcagggctggaaacgctattggtatcgggattacaatcgggttgaggcgtctctgcctggaccctctttccaagtctggcgctaattatcgtcatgtcattatctatgtcgcatcatgaggtcgtgctcaacgtcagaatctgcgctcatacgaacagctgtgtagcggcacctggatctggcatccagattccgcctcgctttaggctcttgaaggccctgccgcatcctcctacagggcacttccactcaaactcttccggggcgaccttggcaggccgacctcgaccggtcttcttcgccggcggtgctgccacaggcgcagcgacctttctcttccttttcgacccaatcgccgtattctcgtcgtcggcttcggcggccatcaaagctgtatcgtgaccgttcggttgggtataatcccctcccaacacctcgtccgggatgatttctgctagcggcctcgagatcttttcgtaacacttggcgtccatcacatgtccacacctcagtgcaaacactcggtcgtcctcgttcctcatcccctcgctaaccctcaaaggagcttgacattcggcacagacgagatgaggtttatggtgcctcctctcattgacctgttgtccgagttcttgtgtccagggctcgtcctcgtcacaatccagtcggataacgtcggtcggtccagccccagcttcgttattctcccgatcaaagtcaaacgtatagccaggctgtggcgaggcccggtgtcctatatagtttatccccttccacatgtcctcgatgcttggtcccatgtgtggttggcggagcattccgggatagatccctagaccaggtaacccgccgggaaatcccgtcatcgcgggcgcacccagttgctcgccgttcatgtagaagcccatacctcccgccgtcggaccggcccccagaaagtttagccaactccgtcctggaccacccgccatcctcggttcgatcccatacgcttctgctcctccagcccctagaccgcctcgtggtggcgggttcgcttgtctcgcagctgctgcctcctgacgatcgagctctctcgatatacgttgtgcctcgagcgcgtcggctcgttcttgatcggtggtgaaccctgctcgtccgtgcgtcgccgatgcgggtactgatgcgggtgcggcctctgttcgtccaattcttggtgtcgatgttcgactgggcgtgttcgccctgcccggactttgatctctgagcaacatctcgtctcgctgccgctggtttctcagattcctgacgggcgggcggactctgagagcgtctgggtcgagcatcgcagatagcctgtccgctactgactgtggctgcgcttgcgtgagcctagaaccatcgacattgttcgctccggaagctataccagcagattcggaccgatgttggggaagagagcgaatggtcagtctcgttccggtccgctctggtacgtgtctgatgtgactgaccgtcacggctaccattcgccacctcgccgaccccgctcaactctctctgccaatccatgatcctcctgtccactgcctcgtcccccatgacatccctcctcctctccgccgctcttctctcggcaatctctctggccgtagacgatcccggcgcatccctgcgacccgatgtcggctggcgctggacttcacggcgatcctgctccgcgtcgggttcagatcgagggggatcgggagggggaatatcgtcccagttctcatcatggccttcttgcaatatagctagtactcctgcctgaaaagcaaccaaacgagggtcaccgggttcaaagaacgatgcgactggctcgtataccctcggttcgaactctgacgactcgtcagaatcgtcttcagaatcgccttctgaagtgacggatcgtgctcctacacctcttggtgggtcgacccgtctggtacgttcatgattttccgctacatagtcgatagaatagatccgcgcagtgagcttttcattcgtcaggcatgtctcgtcatccaaacaaaagaaacatggggctggacttaccggccgctcgaacccctcgtgcgttgtcgtgtatcctgaaaccggactctcttctacctgcaggaggttccggcgagatctcgttttgttcttgtgcgaggtaatctctgatcgcgcctgctctcgctgatcgcccatgctgacgttgatgatcaagctcctccgttgtcggaaaaggaggccgaacgtccctggtggtagaggtaggacctgatgtgaccctacgtgtggatgaagagccagccgtttgcacgcccgcacccgcacccgctcttctcgatctggaacgttgttcatacgtagccccagtggtcagatcgatccgactcgagatgggcgcccgtctcgacggccaatcgctcgccctcctagcccggttgttctcagtctcagcgggaccatcgtccagatggcgaaggtcatctgatctgaggttcagattcggatagtcggtatcggacgaaggctgcggtgcggaatgcggcatgtcggcccaacctcgtcttaggagaggctcttgtcgttctcgggatttcactcgatcttgctcgtgagcgtcactatctcggacctggataccgatatgatgtgaacgcgatttgatgtcaagaactcggtgttgactacgatcgaatcgctcgtcagacgtatcagcattcaatccgggtcgatatggtcattgattgatgagtgatgctgatagctgatagatcttatcgtccattatcatcagcccatccatctatcgactccatatgccatcccgaactcgctcaactcctagtcatcactcacgtgatgaacgatagtttcaagtggagccccgcaatttacctcatcccgtagtcgactcgactcgatatagagcgaccgtaaccccgttcaatgcaatcgtcaaccgtcaaacgcacaagtcaagcaggtttgcccgtaatcccaatcgaattagatattattgcgtactcgtccatgatcggtggcgcggaggggatacacggataaaagatcaaacacacagaactacagtctcccacgcaagagtcattaaatggtggtgacggaaaagacacatcctcggaacaatcatgtaacccaggttctacttgaggggaacaccggtcgatccgtggttgtccaactctcgctacaaagtagatcaggtcggacgatcagttttcagtgccccaacacgggtgtgaaatcgggcggggagcgatgacgaaccttgtggacgtatttgccgttgtgccagacgagaccgtgaggtccgtccgactcggggtgcttgtcggcatccgagtatccacccgctacaaaatacgatcaaagagtgcacccacgaacgatggtcaggtcacttgctcctcggtaacaaaaccccgcgcgcaatctactcacacttctggtggtccttcaactcttgcttcaactcggcgaccaaaccggtctccttgtggtgcgacttctctccggtggtggtgttgttgttgctgtgggacaaggtggcgggcgagataccggtagcggcggcaccggtggtaacagcagcgacgggggcggcaccgacaccagagtgagcaccagtgtgggcaccggtggcgagtccggtagagttacccttgaagtgctgctggccggtcacgctgtcaccgacgacaccctcgaaaggcgaaggcttggctccactaccgaccaacgcggcgccaccggcaccagcggccagtccacccgcggcgagaccgccggcagcgagaccggtaccggaagagtgcgagtggtgctcgtgggaagcaccggttccgacgacgggaacgttggatccggtcctggcaccgtggttgtcgtgggttccaacgacggggacgttggatccgctcctggcaccgtggttgtcgtgggttccaacgacggggacgttggatccgtgtcggtcgtggtcacggtcgtgggtgtggtcaccgtgtccgtgggtcttggtgttgtcgacctcgccgaaagtcgatcctcggacctccttgccgtggaaatcgtggtcaccagtcctgacaacgttgggtccctgcctctcgacgtcggcgacggtgcctccggtcaaaccgcccaaagagtgatcacggggtccgtcgtgctttcggtcggttccgactcgctcggggttggactcgaacgcggtaggacctccgtgtccacctccaatacctcgctcgcccgaggtggtgttcctggcgtcagtgttgtaagcagagttggtgacgttggcagcggcggcaccggtcgaggttcggtgagcatcaccggttcggtcgaggtggtcgtgggtaccgtgcgagcccgaggtgagcccggaagtgagacccgaggtggcaccgtgcgaagtggtggtggtcgaggtcgacgagccgagtccgtgagcaggggtggtggagactcctccgatctaaagaagcgacgtcgacggtcagatcaagtaggtagattattgacaaggcaagcaaaaaccactcacgggagctccgaggctcaatccctcgatacctccagcagcgtgttcgttgtgagacatgtttgtttgtaagagtctgaaaacgcagtgaatggtggtcagggatacaactctgaatgatctgtggccagcgagcgagcacgttttcatagactcacgtgttgtttgtttatatggagaggagggctgggaatcgaaagtgtgcgtttattgttgagttttcgacggggacagtgacgtttgacgatattgtgatgatctcgagcgagtcgactgtatatgtagtccaggggggaggggttgggtcaggttgcgctgcaggttggttccctctttggaatcatcatcagctcgctttcgatcgtcgttgccctcctcgctcccctgcctcctccgcctgccccgcgaccggatcaagaagaaaatgtcgtcatcgagtgatcatcacaatgacgtactcacgtaccccctgcctccccccaccccgcgccagcctgtgccctttccatcgccgggcctgcgggcgaagcacgcgcgcgccatttcccttttccccctttctagcaaacgccctcggcgcagctagctctttccctcgtcggttcgactttgattcgtcatcgcgcgtttcacgtaccaggttagatcagattcggggagatcgtcgggtttcgaatgacaaggagctccatcagtcacgactaaatgccgcttctgagaccaaggggtttgagatcccttcgaaactcttttgtgtaaggataaaaaagggctcacggatgcgtatacaaaggagcagtctgtgtcagtcttggctggcgaaacatgagaggtcgtcgtcgtcctgccattatatatcgtcgtgaaggtatgggctgcagtctggtgacacgaccaccgcctcatcggcaatgcgcacatttgcacttgaacatcgcttcaaacttcaaactaatcattcgcataaaagctccggcagctctctcaccctaaaagacaaccacacttcactcgatgactcgccttttctattccttgactgctctcatggctggcctaatcgatatcactcgggcaggtccgatcacatcccgcagtgacgacacttccgtgatatataccctcagaatcgggtacgatgcggtatggcctattgaatactcagcaagtaccccatcccacccgtcatacttcgggttccgcgcggacgagcgccatccagctgatcctgccagcgcggtctagatcgaaacgtggacccagtccaacatcacaacctacgattgcgctcaagagtgtgagaacgtcgacagtcagtcttctgtcagatcgcgttcgcatcaccccacccccgctgaaaccatctcgattcggttggcgcacgatctcctagaatgtcaagcggtacagtggaacaaggaaacaaggaaacaggggatgatcaccggtgtaccctgtactcggaaaagtacaagagttaccggccctacgatcctcacggacccgagggagagatctcgatcgggaacaagggagtttccacgttcgatcgtgagtatttattccatcttgactgttgtcaggtggatcgagaccatactcgattagttgcaattgactgatctcttgctcaaatgaacggcttgtgttcctcgatcgtcatcggcgtgatccgacgatagcgtcgatcacctatcttcaaatcgtacctaagccgaaagagtagaggtcgggagacggcggtccatacccgcatcgaccgagcagcctcggatcctactccgaatagcgcgttatctcggtccgagctatggatgccgtctttgttccttcttaggcgatatggcgccgagcatcatgagttcaaagtgaatatattacctgctgtgcacgtgcggtagatatggcataatctaggacgtgacaagtcgactgagtctttccgtgatcaagatgattgatttaccaagcggcgagtgcccatcagagtcgtcgtcttttgcctcgtccccgcgtcactcgttccttttcatggaatcacgtaccgagatatcgactatcttcgagtggcataccaacacctttgaaggcgtccggttatatcaatcagtcgtcctacagagcgaagctcggaatgatttataagcctttgtcgaagatgatatccctttaacccgagcaggactcatcttggcaactccagccttcttcatccggattgtggctggcctcggcctcaacaagaacaacacatacgacaaggccatcatttgttgtatcgagttgttgaacggccgtgttgttgggaacaaggatccctggtgtattttcgagagtaaagttggacatgctagatctgattcgctcttgttcggtggcaagcagcctgatggtatagatgtctggggccgaaaatatctcgccagtagtataatgcgaagcagctaaaattccagcgggaatcaatgtccagccacctagagctttttgcggacatggctgagaaacacgatcgggcgagatcggtaaggccgatttcgtgaattcgactgctgggcacaccgtggctacagagaaaggagcccctcgatgtcaaaggaaatggcaaggagctacaacagggaaacgaaacagggatttcccggcggcatccaggctgcgttcggggtatggcatgttttacaaacaactaaaggcaggggtcggattccgatggcggatgagcagagacgctccgtagtaccaggctcgacgtttcgtatacaaagttcaaccttccctttcagcggatacaccgtttcggaggtcgaacaaaggggcaagtatactggtccagatattacaagtataaagatagggcatcagcagaagcaatttctacatgccggtcgaaatagtattttgacaaggggaaaccaagccgactgaatctttgatagatcagaaacccattatctcgataaacgaaatgctcctcaagacgctcatgattgtcgcatcctcggtcagcttggcagcggctgagttgggcagggacaaagcttgctacgagacctccaagacgctcacgaaattcgcttactccacatggaacgggttccgtccggactccatgcctttggtaaagcatacgatgtgcttggtcgataacaagataccttgatgtgtgctgagatcacctcgttttgcttcttgtcagccttacgtcgaagcacccgccgagaattacgtgatttgcgccaacaggtgccacgatgagcccgacaaatgcgtgggatttaggtttcatcaagcggagaagacatgtggactgtacaacttgtggttccattccgtttacaaagagggcggagactcggtcctcggtatcaagggtaactgttacgagactcaaaccggtgggatcactcgtaagtctgtctcgctgaatgatcagtcgatgttggctgcagcccgcttacccggatcctcaaaatagaaacggacatggataacccgatcggttatgatctggatagcacagcctgctgcaacatttactacgatacctaggttccttaaagaagatcaacgagcaaaagagcgaccgtatcgtacacgtctcgggcggtcttctagcgagcggatcttctttatgttgctgctgtctgctcccgttactatgagcaacgacattattgtaccaacgagatgcacggaaccggatgcacatagcttggtactttgtgctccgacctggcctgtagataataaacatactcctcccgtgcgagcgaacggatttcgcgcatagttcttgctcttgccgctcgagtggtaacaaatgcgtccgaaataacgcgacctcgacggcgatacagtctctgcgaagcaatattgctgactctcctcaatgccaaatcgagtcgtccgcaaccaacggaaaaccgcatcccagtcttatggtcatatactcaaccgatttcctttggagtcagtgaagaattgatgaggcagttgcgagtagctaccatggtcaaacatctcgggaaccgaaacgaatgttattcgagcgggacgaacttgtgctgatgatgtatctaattttactacactccacacagtctcgcaatatgcatagatagacacagctattgttcgttcgacttgaactggagagttccttcacgatggccttccgctgatgatccgattgttctccatcacagcgttggctgtgactttgattggactggatgacgccacaatcatggagtcaaatccggtctatccacggctggatcaaacgacccatctacactctctcagcctcagaatacagcactcgttcatgacgctcacaatctgtctccgagcctctcctggtgattcaggtctaccagacgttaacaacggagctgagacccagacgatgtgatcaaagaacaggtagacgcttcttccctttcatggtgagtctttgtgaatgtctcattctgaaacgtgagtacaaaggggatgatacaactctgattccatctcgcttatataaaccgctgctgtatctcaaccagaatagcctatcagctttggatggctttcgacgatcaggaagttcgccacatcgattatcgtcatctgataaaaatgctctgccgactcgcgatagctatctctatcctagccgcagtggttaccgccgagatctgtccgggtacttcagacaaggagtccgacattgtctactctgtgttttccagcgcatcgagcacttggggcggttcgggagtaagcatttccagatatgttccgtaattacttctagctctcaattgaccttcctaaacggtgtccgatacagtcgatgaccacattcaaagacagtagcagaattgattgcgccaatcggtgctacgatcaaacacagcacatttatcctcaatgctcaggctttgaatacgccgaaggggaatgcaaaatctttggcattttcccgcctgatatcggcgacggtaccatggacatcgcttggcctatgagctgcgcggacagcgcaaaactcgtcaagagtgagtggtcgcatatctcaatgagatcaactcagttgactcaccctgtactctcaattgttcaaatgacacctggttacacccagggggcaattgttgcgacatttattacccaaagccttaatataaaggctgcaaagtccttcatgagcagttatccctttaccttttcttgtagaccccgctagaggcgtgacgattgctatcgatgtgtttcgaattttgtcgttccattggcgcaacgtgtcgatggcgcttggagtgcgaacggaagtaagtaacgcggtgggacatcccagatggaacagggcatcgctgaggctgctgatagagaatgcaatcgaccttacaacacaatggcaagtctccgctctgagcaaactcggttcttccttcccgactgcgatctttgtctatctaccagtctgtcttagcagttggccattttgcctcttcttgtccgctaccctccctttgcaactccctggcgacctcttgatgaggcgcaaagttgatcgatttgcttccgaattggaatcaaatgatgagtaatcctccgatcacaaatgagaaatttgcttccgacatacccaacctccactcgtaacggcctgtactatagatttcaatcacgtatgaattatatatatatgcactccaatcaatttgggttgagcctttgatcaccagcatcgccacgatctttcctacaaccgtcaaaacccacacttcattcgcttcaaaatgtccgctgagcaacaaaacaagaccttccccgcatgggatggtgccgcctcaaccagcctttaccaaggcacctctctcggcccttatcacctcgaccaccgcatcgcgatggctcccctcacccgtctccgtgccgacaacgtgaccaaggtccctggtgatcagtctgccgagtactacgcccagcgagccagtaaaggcggtctcattatttccgaggctaccatcgtctcggagcaaggcggcggattcaagggagcacctggaatcttctcccctgagcaggtcaaggtgtggaaagagatcaacgacggcgttcacgccaagggcggtattattttctgccagatcatcttccttggtcgagtggccgatccttccacggttaagcgcgttttggcggtttcggacattcccgccgacaaggacagcaagaccccactgcacgtcgttgacgaggaggacttggaggtcatcttgaaagagttcaagaacgctgccgagtgctgcaaagaggctggtttcgatggtatcgagctgcatggcgcgtgagttaatgtatcctgtgtctatcaaagtggaactgatctgacaacgattgttcccattagaaacggttactttatcgatcaattcctgcaaagtgtctccaagtaaggggctcgaggcgacatcgctgctgtctcatctgctaatccgtttcccgcattgtttgtagccagcgaaccgatcaatacggaggctcggtcgagaaccgtttgcgattccccttcaaggtcatgcagactctcgccgaggtgttcccctcgaacaagctcgccattcgactctcccccttttcgacattccaggcgatgcgagaggccgacccatacgagactttcatccattgggctgaaaagctcatgaccacgtggcctgacctcgcctacgtgcacgtcatcgagagtagggtggcgggatccaccgattccgacactgccgatgaaaaggataccgtccagcctttcagggagatcgtcgagaagcgaagcggtggcaagaccaagttcatgaccgctggcggttgggacccaaaggccgctgccgagcactcgaagcagttccccgacgacctcatcgcctttggtcgatactttatcggtaagctcgtaacaggaggcagttgtgtttgcgaatcaatactcacgaatttggttttacagccaaccccgatttgcctgagaggatcaagctcggacacccttgccgacactgggaccgaagcaccttttactcgcccggtcctgaaggttacaccgagtaagtcggttgagaagcttacgagtcaagacacgcgctcatcgttctcctttccgtcgctagccaaccgacttatgagcaggagatcaaggcccaggcataaaagcttcatattccgatagcttgtatggatgcggagtcgcataatagatgaatactgtatcacaaaagcgaatgctacaatacatcgccgagcgatacgaccgggacaaagacatcgttatgggaatctcgaattggtacaacaaaattttcacaggcgtgtgacatattcataaatcagatcgcggttcgtgacggccgtctcgcatattctacgagctcttccactcgccgtggaccctttcgtgtaccgagtcgcaccaggactgatcgatcaaccacctctcgagactcttttcctttgccatcttgccgatctcgaactcgggcatcatcttgacgacgttgcccgcggcatccttcttgatccatcggacctcttgtcccgcatctgcctccctcttccagcctttcatcgcgatcggctggtaaatatcctcctccttgacctttccgactcgtctttgcgattcttgcctgtaccagacacttgggtgaacggcctctcccgttctgatccccttggccacttcttccgaggtgagggcgcagggctctcgaggctcgcgagaaccaagcagatcgtacggcaaggtgaaactgtccataatctttcctccagcataactgtagacggcgtctctcgctccagaagccttgcctcgaaggaaatccaagccggattgaatccacccctttgtgaccggctcgtccttctgggccaaggcatggggagcgcattggatgatggaaagaatgtcctcttgctgcgcttgcaactcgtccgggtcgagtgccaagtaaggcctgacccggtccaacatccagacgtaggcgatgtaagacaattgttcgtacatgcctgtcttgccactctcgtccttggtcgacgaacctcctccgacgttcgtgtgagcgccggcgaaccagacttggacgagctccgtcctctggttgctcggatcgagtttccagacagagggctcgaagggcgctctttgttcgtccaatgctagggcttggtaagcgtgctgaacgcctggaagtcaacgggaaaagtaagcatgtaagccttgcgcttttcaggtcgacgaaacactgaatggaaagtcactggggttcaaattggtatcatgaaattggtactgctttctcaaggccgagttgtcaaacttgatgagatgaccgacatccgggatccctaacgctccgacggtgtcccacactccgatgacctgcacgacgacgtctttccccaattgaaccgcgtgtccccttccagcctgtttttccctgacgaaagctttccagggttccgtctcgctaaagatcttgtcgaatttctcggctttgatgtactgggcgtagaggaccaggaagtggtcaaaggaggaaggtcgcaggacgcctagctcggtgacgagtcccgcagcggaacggacggtgaacgcccctcgagagaagccgaagaagaagagttggtctccgggagagtagttgttgacgatgaagttgtaggcttcgatgacgttctcgaggaggcctaatcctgtactgcctgcgggtcgagcgaggaaaagtgttcagcatcctttggtattacaggaggggtttcgacgttagagctaccttgacgtttcttctccaagctggacagatcgcctgtaccgactcccgcatcgtagtagacgacttgctgccaatcagtcccgtccgagctcccggcgttggcgagaatgcgggagagcctggctacgttggacggggtgccgtactggggatccagactggtggaagattgccaggttccatcacaacagatgacgagcttcttgggtccaggccgagtcgactcggatagagtagaggtgtttgacatggtcggttgtctttgtcgatacttctggtctccctaaagtgaggcggagggcgtgacctttaggtgtcaagtctcggcgtcggtctttataattcgcagtagtcgggtcgatgggtaatgtgagatgatcacgagaccaaaggatgtctgtttggtggattctgcaggggaagatggctggacgaggcgagcaagttgtacgaatcacttgatcaacccaaaagaatgtcgtcgagttgttcacatgatgatggtcgacttgttaagggaccgggtggatccgaaggttgtaactcgcgatgatgcccgaacaggcaacgtgacggcattgagccggatattctggattgaaatttgatatcgcacaattaaattctgctacggtggaaagcggcttggtgtagtggaagcacgctgggctcatattacttcgttgatggaacccagcggtcctcggatcgagaccgagagccgctacaactttttgccgtttgagtcgacccctaaatgcgacgcgcttctgagcgatcacgtctatataggtagtcgtccttcatctgagatagaactgactcgcatcgggtttgcgctgtgtttcatgctcctcggatatgctccgtgcaatgcgtaacctcgctggcaagcttttgggcatccaggttaggacgaaactagaaatcaatcatgagtggcgaccttgtcttgccagtatttggttgtacttggtttgcggccatctcgcggctgcgtgcggggatccatcaagccaagatttcacattcgggccatgatactgctggtattcttcagcggcccagccatcgtaatgtattcagcgccgaccgggtttcacaaggctccaatcgtcacatcagcgagacgatgaacagggttgtttgtggcgcagtgtcgacccgttgcgtccacaacgccagaaccacgaatccacgaatatcaataatgatgtactaggcaatacaatctccctcgtcatcgcttttcctcgtctaccctgcccatgttctccctcttgacgccacccatcgtgtgtttatccacttcgcccttgccgagtataaacgtgtaactctcggaccgctccctcttgatcctggcttccctttcgggttgggcggtgacgggtttgacgagcgggaccttttcatctgacagggacgaggaggtatctttttccactagatgacgggggggttctagtctgggcgaatcgtcgtctgatcctgatcgtcgtaatccacccagtctccgttcatccgtcgtggtcaacgtgttgctgttcaccgtcgagttggatggaggtaccgcgggggaagtgctcctgctcctctgtccctgcatgttgacgcctaacgatcctcctctcttcccatgcccatgtcccgcagccgtccccggggtcgctcccgacttgttctctggcgggtcgaggaaccacctgacaaaaaaccaactcttcctccaacgctcttccctgatcttttcccccctacgtctttcaaacgccgctcggtaccgctcgtatccttccttgaagtgcggtgagacgcgtgaggagaagatgagttccccacgtgggttcgaagtgggggggatgggtgggatgagctgcgtctgatgcgttgtcgttgttggtgtcacggccgtcgtcgtcggtgtatcgttcgtccctcccacctgcccgttccctaaccccccctgcatcaccccgatcccccaacaaggttcaattcgaattcgagctcccgaccgcctcgccgcgcagcgatgcctttgacaagcggcctaacggaaatctgctggcaagtcctgccggtggatcaaggcacaatcctgcgagtcagcctcaacggatgccagcgtcgccttcaatgtcgagatcgttctcgaaacgttcgagcctcctacacccagtcgccgcaggtgtactggaggggccagccagtccttcgttccgtcgaagcctggcgaccataccagagccacccggatacgagaaacgactacacccttacgcaattcgaatgctggcggaactggaggatgtacaaagagaggtacgtttgaagccgcgtcacccgacgaggaatgcgcgcagtcatcggttcgctaaatcatggcttcccaaatcttgcagtacgaggaatggtgggccgaagacgggccggggaggcaggacagcgctccgcctcgacttacgatcgcttggcccttttctgaggaggaggactgagcatgacgcgcgtatctccatcttcatcttctcattcgttatcacactggaccgcgacgatttttcacgaagagactgttacgagacatattgccgggtctgtatccgagttttcgcttcgccttcgatttcactagcatgcatgtatcagcccgatcattcactcagatatctacttgagaagcagcccaagatgagagtgtatttcttacgatgcatttcatatgacaggacaagattacgtggcatgaagatcgggttagtcctcgacgatctggcacctgttgtagttgcaggctgggaaaaataggccaatgagtggctagactggcacgactcgaccctttcgctgtgatcctcttcgtctttttgtcgtacccagacgtccttttgccatttgatactgtgcctatggccgccatcgatccgatcgggtggtgataccggtaaggcggcggataccaagatcactcgcgatgtttggccgaggcggggcgcggggatcgatgacgacagcttcgatcgccgaggtaaggaacatgaccatcgacaacgtgtacacggctgacaaggcagggtgataggtatataaactacctgcatcgagggattcagacgccacaggctttaattctgtatctagcttcagtctgcttttgaaactcaacttcaaactataccaaaccgaccgtcaccatgtctgtccctgaaatcgttatcaaaactcgtcaggccgcgtctggtcaatccggcgaaaacgccgaggtgaggcaggtcaccacgaccgatgacatgcacccggacccctcgaagagcatcaagttgcctcccaacaggcagaaactggtcgacgatgtcatcgccctctagtgagtccaagtcggaggatgacgtggctcgatttctagtagcgctttgttaaaactcgctggcacctcgtcttctagctcgatgtgagacgtcccgtaacccttgatcgtgagatttccagcgggtgtactgatcaaatcatgtcgacttgatcgaaaggcaaccgaccgtcgagcgtgtctccagatacgcccccagctgcgtaagttgaccgtcactgcttgacgattcgcggccggtgatactaatctgtacttctcgatcgacacgcgtaggtttacggtatgtttcagacctgtggctaggcagacctgagtccgtgtcctcatgaacatgtcgtatgaattcgtagatgaccagttcgtctacgccaacaaccgatacaagatggcctgccagtggtaagctgcaatgccgcagattccagacgaccaacgagatccactaaacagccactgcatcgttctctcaggtttggtgagtagtcacatgcactaagtggagatgaataacggcaagctgatgatatcacgtctttgtagccttgcccaaattgttcgccgctagccgaaacgagggatacgagatcgtccacaactctcaaaacttgatccagtgagtcgggcgttcatccttgtcgaccaggacagacgcgcttgtactcgtgctcatccgtatgtctttatcacaaggttcaagaatgagcaggtaaagctggattgaacctactgtcataagaatatgctctgattcgagagtacgcttgaacagacttgggagctccttggtctcggaagcctcaagccgatcaccatcaacgcgctcgtcagcctctcgctcgacccggccacctcggactcggactttcccctcatcgtgagtacagactgatattgtaggaggctcgaatcttcttcattgacgctgtccatctttctcagacttaccacaaggatcaggcggtgagacgatgaagtcgagtctgttttgctcccgcccgtatcaggttgctgacaatgaaacttcgacgtgcctctctcgcgcatatagaatgaaaagtatgtcttgatctcccccagcgaatgctatcgcctgtccgctgacatccggtttttcctgcgtataacagggattacagtcatggaggtgcgctgtgcttttcgcctgaaagtcgcaaatgatgcgagttactgaccttgacgacttcgctacaggcatcggcttcatcttgaaaaagggacaagccgatattgttcccagccttttcctagacaacacgtctcccgttcactttttcaaggtcagcagactggcaagaacgctcagcgttcatcacaaacggggctgattgatttcgtgctattccatccgatggcgaaacaggaggacgaccttccggacaagcccgtcgtcgagcacggttcgggtaccaacgcccctaccaagaatatttaggcgtcgactctggtcatcgactgaatctcttgatggggatgttagatttctcagaagttatatgtggacgtgattgataatgactgtatctcgtccaatggtgaattgaaaatctctaagacctatgctgctgtctccgcagggttcgtctgtcatgtccgcacagattggcccattagtctcagcgagggaaaggcttcggattcggatacgctcaaggccaaaagtacgacaaggttcgcagccttgctgcggcgagactgatgtgtcactgctcatgttcagagcgcctcacattgcgatgacaatgcatcgaatcagtgtgtccactagtggccggaagttccaatagcggcgcggcagtgtcattctggcaaaatatgatcgttcggcctttctcaagactctgcatgcctcaatcgtcacgaccatcgcaatgcgtaatctcgacgtgacaatcccggtcgtttttctttgctacacgggagaagaaaaaagagccgcgtccgtcgatcataagtacaatccctcgggcgtgttctccgtcttttggtgaatcacggcctccttggcggcggcgaaatcggccttgttgacgcgcatcctcctctcccgcaacgctcgtagacccgcctcggctgtaaaggcggaacgatcacaggtcggcatcagtctcccggttgcagactacgcgccagcatagtcttcatgcaaagttccgctcgactcactgcacacggccttgatgtcggctcccgacaagtcgtccttggtcatgatcaattcttccagatcgacgtcctcggccaacgacattctcgacgtgtgcaacttgaaaatgtgtcgcttggtcttggtgtcgggcatggggaattctacgaccgatgcgggatgagccaagccatcacgaatcggggaagacctgtaacgttgcaagtgggcttaccgatctttcggtctattcgtcctggtcggatcaaggcgggatcgagcgattcgatctgaacgtgcagtagatgagtttcagttagcttatgggcgggatcaggaacgacgggggcagaacctggacctaccttgttggtagccatgatgaccttcacatcgccccgatcgtcaaacccgtccaactggttcaagagctcgagcattgttcgttgaatctctcgttcaccacccgaagtcgaatcgtatctatcaccagcgtgggctcgtatcagcctccaagacgagacctccggagcacgcagaggacactgaccgtttcgtcccgatcgcgtcaatctcgtcgatgaacacgatactaggcgcgttttcctgtgccgtcttgaacaattccctgaccagtttgggtccgtcccccaaatacttttggatcagttccgaccccacgatccgcaagaaagtagccgacgtctgattggccacggctttcgccaagagggtctttcccgtccccgggacaccgtagaggatgacacccttgggaggacggattcccatttcttcgtacagctctgggtgggtcaggggcagctcgacggattcctagcaagacggagcgggaatcgacgatacgatggatcagtcggacagtctcctttctgaaatgtgtttgactctcgggcggagggaggagtctcaccttgatctcctggatctgagtctcgagtccaccgatatccgcataactctccgtcggcgccttgtccagcttcatcacgttgacggccgggtcgacgtcgtccccgagaaccccgatcacggcgttgctcttgtggttcatcaagatcgaacaccccggttcgagcaggtctttgtcgacaaacgacatgatcgtgacatagctctccccaccgccggcaccggagacaatggcgtggtcgtcgtcgatgatctcttccagcgtaccgatagccataggggtccctcggagagcgtccaccttggttcggtcttcggcagaacggtcttcgttcgcaccggcaccggcgaggtgttgtgactggttggcgatgaactctgctcagccgggggcggagcggggaggggaggcacacagggatcaatctacgttgatacggcgttcgcgaggacagccatgctcaccttcctccaacaacaagtaatccttgatcctctccagcttcagcattttgagcttgcatcgagtcgtaggatagacggcagggagcttgacgctggaatcgggacccttggtcttcttcttgtgtttcccgatccgtgtagggacgggaggttcccacttcttgggttcgggctatgaaagggtaggcgacggatgttcaaggcattgtggactcgctaatacgtattctgtaacgaggaccgacctttttgccatcaccgggttgaccgggtcggccacctaatcctgatggagcttgaccctgtcaaacgaacgacgtatcggtttcgatcagcttggttgccataggtagtgacggggcatgagagacacttgccatgttgtaatactgtcttcttgtatatcaacaggttgttgtttgtgcgttgagaaggaaggatcgaattgatttccccatgatcatatcgtcgttgacctgtgcccgcccacttgattgatgatggttacgattgcgattacgcggcggcgacaagttgacaagtgacaaggtgaattattgattgcatcatttaatttgacacgtcatagtcagattacctaatacacgtcatcatttccatgtcatcatgattaattgatagtagcccccttctcattcgacctccaggccaaagccgaactctatatctgtttgtcttgcctctctacatgtttgacatcgcactctcgaactccatctcaccttcacaacatctcacctgcatttcgcaaccagcaccatcttaacaaccatgcataccgtctttgtacgactccccgctccgtacaggacccttcaagtcgcgggatgttccggtacaacctcgctcgcctcgcttcccctcccctttgatctggacgggtccacctacctccgcacctcatcctccctccccctctcccctcgaacacaattgaacactctctcatgcgactcggatcccacctcgccgatctttttggaactgggggtacgcgttcgaggtggaaagggaggattcggcagtcagttgagggcggcgggtggacgaatgtcgtcgggaaagaataccaacaatgatagttgtcgggatctgagcggacgacgcctgaggacgttggccgaggctcaaaggtgagccggcggatgtggttgctttgcaatgcctcgcggggtcgatcattgactctcgattcgatgcgcatggcatggcatgacgggtccgacatggcaggatggcagaattcgtagaatcctcggaaacttcttcggccgttcaactcgctgcgaacaaggccaaactccaagccctagaaagacaactagggatcgactcttcctcctcctcgagcccctcgaatcccaaaccaaggtccggtgcgacatcgacatcgacatcggcttccacttccggacccaccgctacagcgacatcctcgtcatccaaaccgaacccctcggagccggaccccgagctcgtcaggatcgcgcaaaagcggaaaaagtttgacgacaatacgtttttcgagacgagtcgagagatcaacgatggagttcggagcgccgtcgctgccggtgagtgtcccccccaggtttgaattcactttggaacgaccgctcggccgactgacaccgtccgatcgtctgcatttcgctgtccggcacaggtttgttgaagaagaggaaaaaggccaaggtctcccccgaaccggccgtcactcccgccagtggtgctggaaccggcaaggggaactctgcggatagcgccatcaaccagggaaagggcaagggcaaggtcgttgatggccccgcggtcgttgctgctacagcataggcgctggcaaagtcgacaggggaccagctcggcctggtagacagagagagggagggagcgcaggtctggtctagtcagttgtattttctcgtcatagtcgatgtattcgaacaagttttctcgctcgtatcgtgtgagaagtgggcaatatcgattagcccatcgtctcaccaattctcttccacccgtcctggtccttaagacgatttaggctcagacagtcttggacggcttccaaaagaacccaccagaagaataatgttcgtgcagcaacttcccgctctaaacacctgccttcctgcccaaccaaactactccgccatttagatgatagaccccctgttcttaaatgctgatgctggactggctcaggtccggtgacagcatcctcaaagaactgtatcgagagcgagtcgttattgaataagtaaagaacgatccaagcgaaacggtcaactgacgacttgggccagtgtcatgttgatcgtgttgatcatgtcacagaacggtctgatgaaggtaatgacgagttccaagagacgggcaaagaccaacgtcacaaagaggatgatagcggattcatgcggctgctgagagtctgacgtgcctgtgacggtggttactgtagtcaagcggcaagacaccgtcgcaatttctcgcctgtccatcgtcttcgaagcgccatcgggtcgatcgagatcgaccccgaggagttttgtactcaggcaggttgagacgaatacctggacgcccatcgtccaggtatacccaactcgttcggctcatatctagaatcaaagttatcatacatattaccactgggccattgacaatttcgacctcctctacgatgcaatacgggatgacaatccgtggccctacacccctggcgatttcctcccctttttctttgtgaggtcttgtacttgggcaacgtccgatttagaagaacgacctctttggggacttgtcctcgcctacgagcgggatcccagcttgaatcatcttgacggccatctcgaacaagtagtccgcgcactctgcttgcgtcttggcctgttcccacgtcttgcctggagacgtcatcgagtcgatcaagaaagtagatgagatcagtacgattgacttgcacgcgtgcggcatggagagagagagagggcgagacttgccccagttgtaactgccgtgttgacggacgaggacgaccccggattcgggatactcgttcatcgcctaggtagtgtacccagaccgagacgccaaacctcttgatcagcgcgcgcccaggcccaggcccatccatccgacctgacctcttgaactcaccgtctccatcccgcccgtgagatcctcctcgtcggccgtgttctcgatgatagggatctcgagcgtgtcaaagtacgccaacgccttgcccgtccccccgattcgcatccccttgatcatctccatgtgtgagatcttgaacgacttggcatcccgcgggagaaggagggtgagcatgacttttggtccgatagcgtacgatcgacagcggacggaacgtcagtaccccggctacgtgtaagcacactgtagacaacaatcgacaatcgacggacggactgacccgcatgttgactatgggtatgcacacaagccccagcgtccctcaatcggaaggcgttccagaacaagggagtacacgcgctctccttgagacctgcctttttgggttccctgagcgtcacccgtttgctacctgatcgaggcacggtcggttgatcgaacgggaggacaaaaaggtctgacggggtgatccgttctttctggaccccagagggagcgaggtagacgtgtgcagcgtgacggatcgagattccacctccggttccggtcacccaaccgagctctatcgatggatcaccgaggtcaggtccaggtcaggtcgtgtcgtgtcaggttcggttcggtttctggcttggacgacgaggacgcaggagcgctcactatagaaacctctacaaagctcggggatcaagttggcaggctggagtaaaaggaaggatgacagcgcgttcgatgagcttggcaattctcttccccacgagcttttccgctccgagtgacgggtagatgaaggatgaacgtacatgttcggggtcgtccgaaatgacgagatgttcgttgtcgtcatcgcgcgattgttgctccgaggtggatgtggaaactgcagacatgattgctagcttgtgagatgacttgccaccaagtattgcaacggtacggagagggacgagctgcaacttcttgagatgatcgtggtatgatttttgaaagaaattcaaaagtgagcgagcagccggattcgacgttgctcatccgtctactactgaagctttcgtcactttgtgtggtcgacgacgagtccaaggatcagttgggcaggcatcagggcaacgacaacgaagcgcctactctacaacaacgactactcatgctatattgcactctctatatcatccctttccatctcatcatcaggtcactcacacactccacaacatcacaggctactagtcaagccaatactaaatagactagactggattgacgcaccgcacatcgccccagttcacacatcacgaacccacaacactaccacgaacaagacttgattcctctgcaagcatgtcgagatcttacgaccgaggtgaggagaccatttctggcaaccactcaagaccttgtcaggtcgaaacgtcacgtctgctaatccctggaaaccgccgatcgtcccagcccttaccgtattctctcccgatggacatgtgagcattcaccatcgacgaggtcgtgatgacgaatgaatagcccatctgatcatcctttcccgacgtccgaacccatgtagctcttccaagtaggtccccggcaccatctcacctcgatgagaagccagtgttttgaccctctttcccctcactctataggtcgactatgccatggaagccgtccgacgaggcacctgtgcgaccggagtccgggggaaagacgtcgtcgtactcggggtcgagaagaaatcagccctccagttgcaagaccctaggaccgtcagaaaggtcgccaagctggacgatcacgtttgtatcgctttcgccggtgagtctcggtgggcggccagggtcacgagccatgcgtcatgggtcatggtccgtaaaggctgacggatgatgatggacgtgtgaaacgactctgtaggtctgacggcagatgggaggatcttgatcgacaaggccagggtggagtgtcaatcgcataggctgacggtcgaggatcccgtgacgatcgagtacatcaccaaacacattgccgggatccaacaggtcagtccgaggaaccgatcgtttactttgcccgagatgtcgatttcgctgaatgacttttctggcgaatcgggggttcgatcagaaatacactcaatcgggaggtgttcgaccttttggagtgtccaccctggtcgtcggtttcgaccccaacgacgtcaagcctagattgtaccaaaccgaacctagcggtatctactctgcatggaaggtgagtcgcgaacaggccggacggactctgatagacttgcggggtcatcggaaggaggggggtcgcgtgatcactgacctgacgtctttcttgcgatgcgatccaggccacggctgtcggacgatcgtccaagactgtccgagagtttttggaaaagaattacaaggaggaccaatctagggatgatacgatcaggttgacgatcaagagtctgctcgaggtcgtacagaccggtgccaagaacattgagatcaccgtgatggagagctacggcaagaccacggtcagtcgccgctcgatctttttccccctcccgagctcgccagctcgctcatgtgtacgaaagtgaaactcatccgtcattcgttatacgctcctttgtctcgggtaggaactcaaaaacgaagagatcgaagagattgtcaagtcgatcgaggctgaaaaggaggccgaagccgagcgtaaacgcacccgaaccgccgccgtcgctcagaccgctgccggtctaggtagggatcccacgctcgtccagactgggggtgccgggggtgtcgattccggagccgggtccaccgagtcaggtcaccagtaaatgagcaccgacttgcacgaggttgatgtagaacgaggtagtgattgttggacgatatcatgatgaccatgtaattatgatccgaacgaagagggcggcaatgcaaaggggtgcgatcattgaaggtgcatcatatcaggacgaagcgcaaccttggctcggcatatcctcgaaatgcggaagcagatctcgaatcgatcgatcagcgcccgccgcttccccttcctgcagccatcctctacttgctacagtacttgctctccaacttgatttcgcaagctcaccgcaaagaagctcctcttcaacctgtaagatcagtcactcgaccaagaatcaccatcacgaatacatcataatgtcgcagatcgcctggggaaagtgagtcccgatcggacaggaacgaagcggggggttccaaccaggtggtggacgaccgcaatcccgggaaacgaggaattgacgatcgtggtgtgcgctctcgttttctttgtttcttccctggcttcaatacggtacggtgaattaacaggttcgtcttgttcaccgttggaggtacgtccgagatctaggagcaaaggcgggggaggaagaggtccgctcatacttcgtttgacccgtctgttatccgtcatccctcgtccatccgaacaccgatcgatcgaacgtgcgatgcggaaccgaccgtgtgcacagttatgggagtcggatacggggtcatgaagggtcagtagtcaggctaagatgatacgaacgtcgaggctgagctcgatcgcgacctcgacttgatagtcgccacaccgacggacgagcagttttacaacgtacgcacaaacgtcacctccatgaactgatagggatctataactcggtcaaatgtcgtcctttgataggctctcgcacctgatctcaagcggaaagtcgatcagattcgagctcaacgggctacttcagaggagatgaggaccaagttggccgtgagtcatcgtgcccaggtcgaacacttctggcctgcatgcaggttgctgactggatgtctacgcacatgatcgtaccttgttccattctctgtgtgggcggtccgggtgtaggagagtgcggcacaggacaagatcgtctggggtgaagtctcgccgtcggggccgaagcgggtatgagcatgtagggcaaatgaacctgtgatcctggggagaatttatgtatcatatgaatggaacatacaacgacggatgcttgtgtctgtcaacgggtcgtggtcgtggtcgtggtcgtcggttgaagagactgcccaaattgacgatttagtagtgtgatggtcgaggtgagtatcgtctttgtaattgttctcgcgtgacgaagcctcctcacgaacccgaccacaacacacaagcacaccggtacactcgcaatactcactatgatcatcatctcctgcctctcccatcatacaccaaccgacatatcgacggctttgctgctagataccactctcattcaatactagacttccacgaagacaccggcctgtacctctagccaagttcaggagcacagcgagcatctaggcggctggcctcaaacctatcgacttgggggactcgaaccatatcacaggggcattcctttgtttcgttctaggacaagggggatcaagttagtagacctcgaggacaccattcatccgattgggaaagtcctggatcgatttcttgtccacgctcatactatacttgcggaccgcatcgagctcgttcgggacatcaccggcgtaaagctcgcagccaccgagacatcccagcctgatccaagctcgactcgaccggcccaccttcacagtcctctatctttcccgatacgagagaatatcgctagaagatcggctacgacgctacgcctctgacgaccaaggaagagctgatctagcggcaagatgcgggactcgaactactcgttcccggcacagaacagggtatgcgtgagcatcacggcgcagctctacgatagaagaggtatgtggactccagtccagatcccacctctttgtcccaagcgaatgacggctgaaccatttacgaacattcgcacttcgcagctctggatacggcctccatgctccctttgctacactcgcttactcatctcacttacctcacctcgacttcgccacggatccgtgatatactcgtcatcgatggaggactcgaacgtctgctcgagatcttgcaagaatcagctctccctcgttcggccacgtcgcccatcccggattggtactccctacgaggtcctcatacggctgcgatcatcaatcatcaacaacagatctcgttacggcattccctggcttttcaatgcgtcgtgaatatcggcgtgaggggatccgagatggtcagaacgagggtggtgcagagtggagcgctcgacgtcgtaggacagatcatggaggtctggttgaagggcaaggggatgtcgatccactcgggtcccctgggcagtctggccgcggtagagagggccgccgcgggattgcaacatccttggtatcaatcatcacgcagtcgggatcgacacaaggagagggaaaaggagagagaacggcatcgcgagaccaggcattcgggcagtctcgacccgagtcggtcgaggatcagccccccaccttttcctgagacccgctcgcataaccgtcaacccatgtccaatccttcctcgcacggtctacctcccggccgtgtcatctcgaaagagtcgctcgaacggtctctggtcccgcaggatgaaccttcgccgaccgacattatcgtcaacatgctcagtctcgaacagcgggcgtccatcacgaggatcaacgccgttgcgcggcttaccgggatcgacagggggttcatccgacgagcggtgatacagccgaacgatcagagtcatggcttgaggaccctctttcgatcgttcggactggatctcaacgtcatcttggcgctcgaaggaggtaaccttaatggcggattggtaccctcgggtttcgtctatggtggtgacgagcggtcgtcatcgagaacaccacgcgagatgcccaccagaccgacgcggatgccagtacccgagacccgaccggaggaagatcagctgagagccatgtccatgacgccagactcggtggtagagggagaagacgacgtgtcgatggacagctcgggtgaacaggcagagacggagatggagccggttgcaacgacagggtcgagtcgcagagacacgatcacatcgcccgagccacgggacgtgcccccaccacggcagggcgaacaggcgctcaacctcgaacagcctacaccccgagctgctgtgccgtctttaccgaccatgggcatcaacatcaggccccggtcgatccgtacacccagccacgagacgtcaatgcgaacgttgcaagagcaatctggagactcgccgttcgcttcaggatcaaattcgaccctgtcgtcgctcaacgatcaagccagcgtctttgccggtcctggcttgacatccaccgaatcgatgacgagggagcgaccgatgctctcactccgaagaccgagcgctcgagcaatctttgagtctgggagcggagcatcctcgcccggtatcgatacgcctcctcaatcggccatgcgtcaacgaagcgggaccatcaccaacgcgcgtctacatcaaccgatagcggtgaatgtcggtgatgtcgcaaggatatcgatacagaacaatgacaatcgatccaccagtcgagcagggacagaagacgacgagtcggcggtcggtgaggaaccacctcagatggcggaacaggaggtcagtatcgtcgggaccatggatgacgaggcggtcgaagccttgaacggattggtcgaggtggatcccgaggcgaggacacaggcagaggtggatttggccatgggcgcgcctccgggtgcacctggcgctacacagacccctcgcatcgccgaattgacacctcgtcagacccatcgaaacaatgcacttcccgccacgacgatagttgggaccgacacgaacggtatggaagatcgacacgagacgaccgctttcgctgccgtcatcgcggctggcgctcctaggggcttttctgatttgagcgatctcgtcaacgtgatcgagactacgaccccgacgggcgaggtgacctataacgacgacacgatccttctgtgcttgcaactgctcgcctatctctccaaatatcctcacgtgcgagcggcgttccatcatcctcgacgacccatgcatcccgattgcgagatcccggaaggcatcgagctccccgaacggccggcactttcccaatccaacaacatgttctcgctcgtcgagaggttcacctttcgtccagccggacccgacccagagatgcagaaattaccggccgatattcaatattgggcaggcgtgattatgcgaaacgcgtgccgcaaagatgatgcgaatggaggcattcggcagtgcgccaatgtgaattgcgggaaatgggaaacgtttcctcgagaattcgccaaatgtagacggtgtcgcaaggcaaagtattgcagtaaggaatgtcagagcaaagcttggcaagagggacataggttctggtgagcacaacgtcctcgcgagggtccttgtatcgtcccgaaggctgatgtttcatatcacgattggttcaggtgcaacgcacgtgagcctgaaccgggcgagattgccatcacggggactgtgatcatcggtggacgccattactccgagtcggatcgacgtcgggctcgaagagacgccacgcctgtgacagcggctcccgatgtcgatgtccgcatgagaggtgatagccagcctcccggtctaggattacccggagacgttatcgaaaacgctagagcctttagtccgcccactcgtgcgcgggatgatatcgatctcgacatggctttgcgttatgctcggcctcggaccggacaacgccacgactcggccacttagcatgacacgcgcattgataaccattacagacgtagatctcatagggcatttagtgacgacactagcagctgtatgccgtagtatattgtccagccgatggatatagcatagcgagtatcaactggatgactgctttctaggtgtcggccacgttcatcgcaacgtcgagaatctttccgctccccgcctgagctttgacgactttgcgacgagttcgcctatgaaatcatcgagatcgagcgctttgtcgagactcgagccaaggctgtagtcgatgccaactgtaccacgagcgactatactacttgcggaataatcaaattgggcacagtgaggcccaaatgtatctctcccatggttccgtaaacgccgaggtattctttgtgatcgtttctgtcagccagatcgtgtggcccaggttatgtagagcaggccaatctgctgttgaaagtgaatcttcaccgatattcatcgacggtgccgtctggtccacaaacaaatgggttctcgttcactacaaaagtatctctgctatcgataccagcgcacggattcaggtcgtagatcttctccctcacattgtcccagtatcaaaggctgctgtagatttcacaacaagaccttttggctcgatcatgttgccgagaccaagacgaaggtgcctgggcaatcatcttcaggtattatgcatcaagttccatgacagcaaaggcgaccttttgaatccacaaacaccgcctctccatgtttcctcctctccgcaagtcatccgagccggaccgtccgtcgtcacgcagtacggtctcagttcctcttgcccttcttgcccgcctttttcttttccgaggcgctctccccaccgctcgtgaatccttccccaccgctggtgacctcggccgcgctgctcgccccaccgtcgagtccggtcttggcacccttcctcttcctcgcggctccgccggcaggtttcaagtgatgcgaaggcacccagtcttcctcgtacggcttgacgctctcggggtaaggcttgccgctttcagcagggacgaccttgaggtcggccgtcgacccggcgaccttgccaccggcgcgcttggaacgagttcgcttttgctgagggtagtagtactccatcaaagctttgtaggcaaagtaaccgagtccaccaagggtggccaggacgacgatgtacatgaacagcctgtcaacggagagcaacgtcgtcaacgatgacgatatgccgagatcagctcagagtgttgacgagggttggtgacaaagacacgtcgccggacttacgcttgcaggtcgaaccagcttccctggggttccacgacggtcacggtcgagttgagggcaacgaacctgtgagtgtctttctgaacgtcttgaaggttggcccagacggtcaaaccgagatcacgaggacggaacctgtcggaccgcaggcatcaatgtcgatccagttcgatcagaaacacatcttgctacgtgggacgcttgtgaaactgactctgagtggacgttgaaggggaccgaaaagttggctccggcgggcaaggggacgttgtacttcaaggccgacgtgttcctgacctacgccagtgcgtgccatcccgatcaagaagagtcgaatcagccttgccgtttctctcatttctgcggtcagtcatgacaagcaagtgcctgagacacgtaccaacgcccagttcttctcgacgtcatggtaactcgcggccgcgttgacgatcgtatagtttcccgtccccgagttgataaacttgaggatcatctggttctgctgtccattgacgaccactgcggcgagtaatccgacacatatacagagagtcaggcgagtgagtgagtatggtgacatgtccgattcaggcagtacgaggatcgactcgactcaccgcccatagggttgttatcggggaagatcgccttgacctcgatatgagacgcatcgtcggtgaagagacccattgtcggctaaagatatgtgtatgtgtgtgtggtagctgcacagaatctaggatgatgctatgaggtcgtcggtcgtcgaaacgatatcgatggacatattgcaactcgacatgcaagtcttgaagagcaagacctggccgctcgctgtcacgaccgatcacccaacgggggagggagtttgtacggaagcaaaaatcaggcgagcattctccgatcaacctcacacgatcagtccactagctgttgacaatggtcaagacacacataaagagagccaatgagggtatatgttcgtaataaagaggtttgtcatgacaagttgctatcggaagtaggctacacgggttgagatcggaaggaatgaccaggatttaccatggcaagggagatgcaggaaaatgatcgaaggtgcttcacccgacgaccatctcgtccggaccttgttgcctcgtcgacccggtttccacgggcgaggggccagacgccgtcgagacgtcgcccaacaacccggccacgtccaacccgggcacctggacgttcttcgctctcaactgcgtctcgccccaacacatcaacctgaccaacccgctcaacttggtctcttgtccctgaccttgcgactcgaggatggccgcgttcaactctcgcgccaccttggtgcggtgatcacgacggagtagtccgcccaggctagcccaagcgggttgtttcgccgcagccgaagcgggatcgaccaaaccgtccgcaattgggggttgtggatcgtcctcgatctcgtccgaagacaaggcggcgagttcgggaaaagccaatagtgccatggtcttttcaagatcgcccaggaactcggggttctgtgcgccacggggggcgagctcggtagaggcgaattcgagagcttcggggacttcgccatggcggatgagctcgatgaaccgttgcaagtgcaagtggaacaacaatggcgggttcgtatcgaggatctaatggttccgagcaaaaggaatcgtttaaaatgagtaaacgagatcttcaagcagactctatcggaacaacatcgagctacgacgaggacaacgacgaccatgactggaaattcgttttcgctttgtgatccctcatttcaggtctgtgataaatttcggttgtctccgcatatccaccccgaagggatttggactaagcgtggtgcatgaaatctttaatcatcgggaaagacgaaaaggaaaactccggttttcggcgtcgtcgtcgtcgtcgtcgtcgtcgtcatcggcattggttggggatagggtggaattgggggaacaggaaaaggcacggatcacgacgctcacctcgctatccaactcgttgactcttcgtacggcttcgtcgatccgacctgcctcgatggattccctgatcaacatcctctcgtgaatcgagtcgaaatcgatcttgcccgtctcggtcgtcgaggtcgaagtcgaagtcgtcgcgtccgagtgggggagatcgcgttcgagttccgaggcgaacgagacggcggcgtccctgtatccttcgatgatcaaccagtcgaggacgagcttgttcaaatcactatgcgttgagaacccgtagaaaatgtcagtggggggtgttctcatctcatcaaccgtcattcgggttagggaaggcggatgggttggggagaggttcagagtcgcaatagtaaaactatgtatcctcaattcggtttaggagagattcccactttgcatttatagtaattctcatcagggacgtagggttgaggtgatgggcagggggcatcgaggcaaggggaaacacgaggaagaacagaaaagaagagggaggcgctcaccttttggacacgtcgacggcggccaatcctttatcccattcttgctgagggactcgattacgctgacgaggtttctactcatcgtcggccagagttgggcatgattggggttgagggtgatggtgaaggaaagtttttggtagaaagcgaggtgagtcacaggatcacatggtggtaatgacgtgtgcaacgggaaaagagagcagtcggtttacagatcaaaagcgatcgacgactaggagcggtggggttagaggaaggtaggtgtagaggtgagtacgtacattgttgggagtcgtggaagcagccatatttatagggtcgaggaagaggaagggaaagagagggaggaggagaggatagcagtgagaatttgcgagggcgggctgggggagagagagggaacgaatcaaacgaggtcgagaaggagaatgagagagagtgaggggggatattcagacgcgtgtatgaaaaggggggagtgaggtggggaaggtgattgtcaaataaaagcgcatatcacccccaaacaggcgcgtagaggggagaggtggcagacgcgtaagcgcatcacggatgcaaagagctgaccgacctttgtcccttcaaaccgtttgtacatgtttcatctggtttggattcaagccgcaaacctcaatcgtgcattcgatttcccgtcttcacaacgaatctcgtctcactagaccgcagtgatcgcgagcttcgagttccactcgcatcgcccttatcgccattcccaaagctgcctacttgacgtactcggcgtgacgccatcttaaagtctcccacacccagaaacatgaaacgacgcaccccgtcagcaagatccagggggacggaccgatcgagaccctcatgccaccctcttccatcgatttcaccgagttgacccctcgatcctgctgcgcagcggcacagatggatacgaggatgataaaggatagccagatcatggccgtcgcggtcagtgtcaggaccaggtggacggtgacgagggtgtacaccttgtccgcgacgtgagactttttacggtgatagcgcgtggtatacgcttgccagattatcgccaacaacaagatcgagaacgcttggggccgggttggagaacgacctttcagcaaagggtcgaataggcggatgacatggggaaggcgcacctacccaagatgaggatgaccgccgctctgctcaacgtcgtcgatactggtccgggaacgtccatcccgagcgatccagggtcaatctgataggaccatccagcggcgatacaacccgtaccccgaaaccttcgagcgcctccatcttgaacgacaacatcaaaccgacaataatccttcggactgaaccggacctcttgatccatcgtcctgatcgcgacgaaccagacccgactcgccgtggtccaggtggggatggctaaaagcatccagacgatgaacgggtagacgaggtgccaagcagcaccgacttttctctcgctcatctctttgttgaatcgtcgaaatcggaatcggaatcggtctctgccgatcacgtgtgagatcatgcattcagagttcgatattgatcctacccaacccgggggaatcggatgggttccctcagtgtacataccgctgtcaacgttatgtagatccttttggctcttgatgaacacgtaatcagatacgaggatttcccggcggagtcgttcgtgtgtcgcacacgtttgctcgtcgaaccgacccggaatctcccgccttttgattattatcaagtccgctctgcctttggcatgaccacgccggtcctcaggcagaaaggaacccaacgccgcgctgggcagatagaggtggacaggtgctggcctggaggcgatccgctttcgggcgaggcggaacgtcaactctaattctgatgatgtcatgtaatcacggcggtacgaggtcggccacgggtcatactactgtatacaacggttcgaggcggtgctggatcctttgagaacgctacatcggccgtctgtgggccgtcatggataaagccgccccgtcgctcccccttctgcctgccatgttctcgttccagccaatgctgctgatgctactgcgatgtgaggaatcgttcgagacgcgattgtgcatgatctcctctcgtttcaacggtgaaattgtcggactcggtgtgccgagcccggatgactgagtgatgactgggatgggtatccgtgaggcctgtccagggccccatttcgcctcggtcagcgagaccaagcggtttctgagccaaccggcaaacccggggctcttgcagaatgatgtatagaattcggtttccaccttgcctttcgtcgtcagacctttcgatcggaactgcaaggggttcggcgccatggccttgaggtgatgcaaaaagcctgtcaaggcaaacggtttgatgccttcaggcgagctgcaaggacaaggcctcggttagtctcgccttgaatcgaggcaggtgatggccatgcacgtacccaaccggtgggatcagagatgctacgtatcgattcaacggcgctagcattttttccgtaagctgaatgaagaatgaccgcaatgtctcgttaccagcggcatctacatttgacgagaatgatcagcgtgacgcttaaccttcgagggttatgttgccttaccatcgagtttgcccgcagctaccagatcctcgagctttttcaacaacatccggtccttagaaacgtgccgcttgcgcgcgctcaagaatccttgaggatgttcgacagagttgtttggtcccgtcgaaggtcttcgcttaggtctacaagaggcggacgatcggtattaagctctgcatagtgctcaaataccgcgcattatgtgggcactcacgagctgccgccaatgcttatgacgtttggccaatgccctgcagcgttgcggaagaatggattctggaaaggcgcgcgagatgattgagcgattttgagacggcaatcgcgggctctcaagcactagactcactgtgactccgacgaccacacctggctggggcttattcgaattgacaagcagcctaaaatccaggtcgtgaatgtgcaagtagggacgcagatcggcgctttccgtaggtatgggtttcatgatatcgcctagccaccagacgatggtcgagcatgtctgcgggtccggagcgatgactaggagaggctctcccaagaccatacactcccacacgtgccaaagagcggggagcagcgatccaaacacccgtagaggttgtatggggggtagtgaagcaaggacctgatcgttttcgagggccctcacttagccagcgatcgatacttgcccgagagtctacgggtactcacaacaggtttcggttccgggctggtttttatccgtggcggtagtgttaattgagggtcttccgtcaagtcgggtaaccgtatcgttaatagatccgtcaagaggggcaactgaagctctgcaccgggtaccggatcgggcctgatgatattggacaccgggcgtgtcagaacgtgtcgcggcagtacagtcggtctatagatcacgctcaccagcctgcgaaaccgtaacagaccgcttccagcgcgggatatccgtaatcaaagtacatcggggcgaccttgtccagcacggccagaaagagcgaggggaagggcaggtgggtcaagatgacgatgctccgctacgaaagaactcgctgaaatcagcgttttcgccccggaaaccaccgcgtcgccgcggagctcttacctgcatatatcctctcgttaccgaccgatcctttttctgacaaaaccagacaaacccgtacaaccattctcttccccgttcgtcccacctgcgataatcctctgccgtttggacctgagttggcaggacctttttcgcgagaggcgtctcggggagctcggtcttgggtccaaagaagccttctctcgcatggagtggtagcggtgtatggggtagcggcgcgggtcgatcctccatctcctctatctcctctgacgatgcagcgtccatgcgtcgatcggatgccagtggtgtctgatcgcccccatcacccaccgaagaagaaacctccgagggcgtactcgatccagacgcttcccctttacttgcaccaaagtacgactcggacggttcccgcgtgagcggtacaggtgctcgagcggtagctggctcgccaatcgcctgtcggatcttgaacgaatacgagatcgaaccttcggcaaacaagctcgtatctgggaaagccgaaaacgccctattcccgtgcacgtgcggcatgcagccaacgtcagcgcattcgatacgagtctggggggaaacacgacatcgtgtcggtctcacacgtttgccctttctcccttgccccaaggtctcccgatcatccgtctttccacgatcggcccgcgatcgatatcaaaattacagacgacgacttcttgcacccatctctgcatcttgcgtgcgacgtcctcgggcaagaaatccgccatgtggttttgcaggtgatgccgtaccgactgccggtgcagatgtgggtgatgggatcgggatgactcgtgcgggctcgatcctggagcctggtcgtgcctcgtcttggtcggcgagggggtgaaagagtactgctgtggttgaaactgcgatcccgtcggtgtggaaggggatcggtgggaagaagggtaggcgctgttccccggtgcgctgtacgggataggttccccggtcctgtctgtagggatgtgttcgtcgggcaggtctcgagtgtccacgctgagcgggaccccacgggaagatatcctacgtgcggattcacgcatggtggaactcgctcgacggatcgtctcgtcgtcatcttcatcttcgtatctcgttccagatcccgagtgcgtcatcccaaactcgtcgatctctcgttgaggatgcccgtccaaaccaggatccctcgtccggatcatggtccgactgcgcccgatgttaccacccgtctgtcgattgatggaatcgttacggcctccgttcttcgtcttggacgagggcgtcggatcgagtgtccattcttcgggagatctagccaaaggagtcttcatgtcatcagtcggggacactgacgaggacaagctcaaggaccgcaggtttggcgtcgagggcgaagaaggtatccgacgggattgaggaggatgtacctcgagatcagacccgtgacgtgcggtgtcgatgtcgatccccaccccgggtttcatgcaagacctcaacctggtcgctccagatcgacccgatgccgcacgtgcagcgtcgaactccatggtcgattgtcgccgctcgaggacgtatgcaagttagtgagtggacgtgcaggcgatctaggtctagttccacatgactatgtaccagctactaaaccgatggatgtgtgtatgacatctagccagtagtctagcttactaggatgcccagcagctgttgcagcctgtccccgacctttgttcccgtaaacgaacaagaatgatgatcatcaaggggtgggggtgatcgggggggatgttaccggaagcaaaacacgctgcagcgcaggaggagcgaggtcggtcgacgatatgccgtacacccctttcgtcatgatgaatcaaagctccccggaatcaaattgccgctcgggcactgctgcccccgcgagcgaaccatcaaggatctgatcaaaacacgaatccctttagctttcagtgatcaataataataatgatgatgatgatgctttgggggtggatcgtccatcatctgtcatatcgaggtttgcttgtttgttattctttcaagatcccactctgtcatgtcgtactctcgttcaatcagaacaacaggggcacaacgaaagatccctccggatcacatcgatatccatacacgtacacgaaagacgagacaatggccgagtctattcggataccataatcgacgctaaaggcagacatgatgaacggcagaccccctacagcggtcgagtgagtcacggtctctccgttttgtttatttgaacgtttcggacgactaatgttatcataccgcttcgatcgtagcggcacctggtttccgttggaatctcttgttcacgggacggtcaaacgtaatttcatcaccaccgagtcgacccgaagcatcaacccgcacctagtggacttgtggtatggaagcgaagtctttggtttagaggttcttcgtgtatcagaagcggagagtgacaagcaagaaccttggttgagagggtatgttcgagctcgttctccacaagactccaaggaggtgctgacgtctcccttgcctggtagctatgtcgtgggcaacccttcgatcacgttcgaacagacgctcagatccgacccgtcggccaccaaattgaaaccctcagtgtttataggagtctttccagccagtcatatacgatgggatcatgatcagcaatccggatcagctcatttggtcatcaacacggccgacatcgaacctagtctccgcggcactatcgactttcccgttccagagaccccagcgtcatctccccctccagatgatgatgctgccatctcatgtatcagggatgccatcaaagactggagcgaacgactacccggatacctggccagacgacggtacaagctcttcgaggcagtgacgagcgaggtcaaattgctggcttcctaccggctacagatccgttcgggtatcctcacgaaaagacaagaagcgcgggtgaggaccgaagtgtggaaggtcttgaaccgggggaatgggctgcaaggtttggacctcgtcgttcggcatccagagacgggggaagaacccaagacggatcagtcagaaaagggagggtggatcgtcaccccgctacgcctgtacttggctcaactggccatcgccgcgctcaacacgcccaaactctcacccgaagagtcgagattggctaaactctacctcgcccatcctgctagagggatcccaagcgttcgggatgtgcggtccgcccaacggaacccttccaactcggcaggaaccgctcaacgattagtagccgaagtcaaggccatcatcatccccaccgaccctggggaatctctagagctctacctgtccgtgtacgacaattctcatgcgaaaaaggcgtttgtcacggaagaattcctctaccaggccatcaaggggggtcacatcacgcatagatccagggtgatcttcgagctcgattcacgcgtcgggttattatacctcgtcgtcaagatcgtcagggttgtcgacggcgggatcgacggttcgtacgctcgactgcctttcggagtctcagtggtcccgctgtcgaacgtcacggagaacccgcatgagagggtattgcaggtcgatctatggaaaagggatatgatcttttcgagcatgcacgaggagcttgtccagaggagaatcaatacgagcgtaggcaagtgaatatcgactgtcaagcggggaatcggtccagatgctgagatgagactggtatctcgtggcttaggcacagggtcgtcgtcggtttacaggcctgtcctagcactgcgactgtgcgcaatgcggttctcgctcgttctctgagtggtcccaatcctgatctcgacgtggccgacgtctatatcaagctatggtcggccatcatccccgaaccggcgcccgatgaggtgtacgtcaagatcaccctctattcgacagatcaacaccgactagtcgattgcatcttccccggcggatcagggacaacgggtgaaggagcgctcgagtacaagtcggtcatttggcagaaaacgtcaaccacgtcagtacccgtatttggcgacctcgttcgattccgtgtggctcgcccacaattaaagagcggccatgtacaattcgcggtcatggggatggaccggggttcagagtcgaccgggcttcgcaggaccaacgagagggtcgtctttaccgtggaattgcctctggcgggtgaaccggatagcgatctctggctgaacgatggtgaacatcttctcgtcccgcccgaggcgggtcatggtttgactgtacggtccctctcgttggtgccattcggtttcaaggatatcaatctcgcctacgtcttcaaacaactacctggcgatatctcggtcgatcgtatctcgttgctacggtatgcgcccgtggacgagctgaagcgacacgcggacaggctgctcgaccatctcctcgcagccatgcttcaagacgtcgcaaactttacgctgcatgctgcgatcatcgacgtattgacaatcatccttgacgacgagacgacgcagaatctcgacttgatttccgtggtgactgcagaaatgaagcagcaggcggttcagcttgtgctggaagccgtcagtctggcgctgagcaatcggtctcgaaggcatggcaccatgaaaagtatggaatcgatctttggtctctgtcgtcacgttctcggcgtaccgttcgacaggcacgaagcgatcgaagaaacgctcctgtccgtacgaatgcagctgatcgatgccgcttcgagcagagacgaccatgtcggacagactttggcgctcaaacactggccgttcgcaacctttggaggtccggacggtatcatcaaggtgatagacagaatccggccgaacactgccggggagcacaagagcaagatgcgtttcattattcaagctatagacgaattgcctctcgatgactcgctcgttgcagcgctatggaggcacataaaagcatccgtgaacaaggatgacgaaaaggttctagaggtcatccatctggcgacgagcgcgattgggcgaatcatcgatgcagcgtctgtgaacgggacagagttgcaagacgcgctcgagtatatcggggtggatttgctcaggactctgcttgccacacataagaggctagccgcaggccaggatcagaccgtttgcgaccgccctataggcctcctgtatgccttgtcgtcacaaagcggtcaggtgtatgactcgataagtgccgagcttgtcaagaaggatactcgagcctgtatcgctggcgccatcaactgcctctcatctatgctcgatcagatgctcagcgatttggacgccggaccgctcaatgagtttgtcgatttggcttgggctctcttcatttccgtccccgggcacgagcttgaagctcggctcacgacctctttcggatcactgcaatgcacgatgtggttgagactttgtcgaatcgtctgccgccaagtcgacaatgtcagcgatactggctcgtctcggcaccttgcgacagtggtggacctgatcaagggctgtcattcagcgcaaacgaaaagcggagcatccgaaggtgaaaacgacgccgttgagatacttcaaaccgtgtgccgcttgggggcaagacccgggtggttctcacaaatcatagaccttgcactggtatcggaatctgccgcagtgagacgagtctgtcatgaggctcttctcagcatcagcgctggtgggccgactgtcgtgagcgatagttccgatccctaccggcaccctcggactgactttgagtatgttgtactacgctcagggtatcgaggccttcctgttgctactagttcatgcggtaagcttctccttcccctgtttccatgagacgcgtgtgcctgatcaggcttcgtgcagtttgttcaaggcacgcagaaggtatcgcaaatcacgatgctagtacaagaagcctcgacgatctggttgacagccgagaatggctggagtgcggctctcgagatcttgccgcgcttgtacgatgccctggagaaacaggactggacgcatccccgtcgtggtaccgcctacctcggtctcctcgagctagtgatgccctttcctagagtgcgaaaagagctcgtcctacggctgtacgaccacgttttcgacatcgagggtgcttccaccgcgaacctgctactcgagctggctgtgctatgcgacgaacccgagcacaagccgtctctacgtttgcatggtcacacctcggctcgtcaactgccggcgaccgaactttacgaggcggccgtcaacgaagctgtctttgcatgtgatctcggattagcgggtaggatactggcttccctgaccgtcgtggccgagcgtcaaggtgattagtaagtggtgttgcacgatatccatcgtagtggcgaaccgagctgaagcgaggtccttgtctagccggcgcgtgagcgagatcttgacctatcgatccaggttggcgcgaatgatgcaagagggcagtcccgtctggcggtacttttacgtagtgcgtagtgtttagactgggagactggatacgaagctcgacaaaggattctgatcgactgcgaattcctggtttgatagagactggtcgatgaggagcgtatcgagctgatctggcgtgctcgaaattgcgtagaattgcaagtccatacccgtgtacgtatgtttttcacatcagctgacctgtgacccgatttcacaggttgtaccaggtccagaagtactaccctcaccactcgatcgccttgcgtgaacgatccgaccgattgccattcccgactgataataccgggatcctcatcgtcgaggtggacatcgactctacccgggctccgggacctctgtgggccaagcacgatggcgtgtccacattcgcgcatgatctcgtcgagggtgatctcgaggtataccgggtggatcatcctttcccggggtcattgccgtttgcgagcgtgacgagcctgacgagggtcgtccagacggagaaagaggtcgtgagacggagaatgaggatcaaggtcgattcgttcaggtccatgttgaacgggataggtctgacagagtgggtttcatgcgcgctgggtacttttgtctgtccgtcccgcgacgtccaaggctgactcgattcgttcttcgcgatgccttgaccggatcaaaccagctcgaacgcgctcagcgggatgctcgatacggcgattgaggacgcgtcgatgacgagtgacaatgacgacgacgaggacgacgaggacctgatcgtcgattacctcgcgctcctattcgagggtctagagatgcacggccagatgacccggggtacgccgatggagacgtttcatacgtcgttgatgagccgtctgcgcgaaaagtttccggcgacgttgagaagcaaggccgagctagcgttcaaggccaggtctaggggaaagagcgaggtggggttgtcgtcgtcgttgggcgtcacttttgggaccaaggtggtaggcgtgacggatcatggcgatggcgaggtcccgcccgtctcctcttgtgcagaccgagaccgagaccggggtgcaggggtcggatccccctcgagcgtccacccgcagacgacccgcctgggatccttctcccccctctcgagatcagagacgctgggctcgtacgggcgtcgatcggacacgacggtcgtctccccgggagaatccacgcggagtccttcggtggtctcgatgaggatcccgatgggggtcaagaggttgagatcgttgctcggcaaggcgcggcagcgccaggatggcgggggtagggaagagggaggatgaatcttgggatggaatgtattcgatttaggacatgatatgcgcatcggattctaggcgaaatgggtgtgacgggggtccccgttgtgaaactcgggatatcggcgggggcgaaatcatctcgatctgtatcgggtgaactcggagttgaggggggtgaggggcgagtgaggttgatgaaggatcgagtgatcggaagctgatgctccctgtttctcccggcttgttactgcccagcctgtagcctatgagacgtcgccggttttgcgcgcgcggggcagaggcgacaggcaggggagggcagggcaggggaggggaggcaggggagagggagagcgggactctcgtctctggttgttcggtttggcgatcgcccagacccagaccacctctcgctcgctcgcgaaacctcgaacctcgaaccatcaccatcaccaaccaccactaccatcaccatcgtcatactcaacatcgccaccatccaggatcgatacacacccgcctggagctcgactataacacctgcgaccctcactcgcacacctagtcctcgtcccatcaatcaatcgaccagtcgatcggactttttactagcaccgacctcgatctcatctctctctctcctctttctcttataaacctttccccgatcgcgacctcttccccttgcgacaactcttgcgatgctccgtcaactctccaagagcatctctaggagccaggcgacttccaagtctatccaaaagcgaggattggctttcgcttcgccatcccaccgcgccaaggaggctaccgtgagtgtctgtcgacccctatctttcccttttttccctgcagccgtcccggatttcacgatcgatacgcatgcacgagatcgatccatctgactcttgttcgtacgacattcccccccccccctgtccatagaactttggccagcacaagggttaccccgtcatcgaccatgagtgagtgtcgtacccggttcatcgccccttgacgaggaggagcaagatcgtgcccccgatctcgtcctcgtcctcgtctttctctcaatcgctcatagactgatcttgaccccgatcgacccgtgtgatacaggttcgatgctatcgtcatcggagccggaggtgccggtcttcgagctgctttcggtctcggtaagcagtctccaccccccttttctcgcccgatcgatcgatcgtcttgctaaccttttgctttgacctctttgccttgacatgcacctcacacagccgagggtggattcaagacggcctgtatcaccaagctcttccctacccgatcgcacaccgtcgccgcccagggtggaatcaacgccgccctcggtaacatgaccgaggacgactggaggtggcacatgtacgacacggtcaagggatccgattggttgggcgaccaggacgctatccactacatgtgtaaagaggcccctaacgccgtcatcgagctcgaacactatgggcttcccttttctcgaaccaaggaggggaagatttatcagcgtgctttcgggggtcaatcgctgaactatggaaagggaggtcaggcttatcgatgtgccgctgccgctgacaggactggtgagtcgagtcgagtcgagtcgagtcgagctgatccaaatcgtgttcgcttacccgccgccccaaaccacaggtcacgccatgttgcacaccttgtacggtcaatctctccgacacaacaccaactttttcatcgagtactttgccctcgacctcttgatggaggacggcgcctgtgtcggtgtcattgcgctcaacatggaggacggtaccttgcacaggttccgagctcacaacaccgtcctcgccaccggtggatacgggcgtgcctacttttcgtgcacctcggctcatacctgtacaggtgacggtaacgccatggtcgccagggccggtctgcccctccaggatttggagtttgttcagttccaccctacgggtatctacggtgccggttgtttgatcaccgagggtgagtctcgtcgacctttccccgtcctctttccatccgtctgtgcctagaccggggctgatgtacgaccgaactcgtaggatcgcgaggtgagggtggatacctgctcaactcggagggagagcgtttcatggagcgatacgcacccaccgccaaggacttggcttcccgagacgtcgtctcccgatccatgaccttggagatccgagaaggacgaggcgtcggtcccgaaaaggatcacgtctacttgcaactctcgcacttgcccgcagaggtcttgcacgagcgattgccaggtatctcggagacggcagccatctttgccggggtcgacgtcaccaaggagcctatccccgtcttgcccaccgtgcactacaagtgagtcgtcgccccccccccactccctagcatctagcatctagcatctagcatctagcatctagcatctagcatctagcatctagcatctagcatctagcatctagcatctagcatctagcatctagcatctagcatctagcatctagcatctagcatctagcatctagcatctagcatctagcatcatgtcaatctcaatctctagaccatcaagcacttgaaccgtcaacaaatcagccaatccgctccaccggctcgactcatgcctttttgaaaaacccagccaacgtctgttgtccctttttcttgggcttggccgccgctgacgtcgaggaagaaccggtaggtttcggtttcgccgggggttccgatttgatcgacgcgctcgaggacgatttcgtcaatttaggcgcggccttgaccgtcttcttcttgggctgaggtgtaccttcgtccgaagagtacgattcttctccagagacgtcttccgtcactgttcatacgtatcgatcatcagctcagctcttaaacctcatgtcggtcctgacgcgcacgtaccgatataacccttttcgttcatcttggtctcggacctaacgacccgtctctttttcctgatcctccccgaaggggaatctcccttactccccgagggcgtaggcgtagtctcacggtcagtctggctcatcgcagtcgaattacgcttcaaaggggcggcgggtctagagccctggatccccttgccagaaaccttggtagacgtctcttctgttcattcagaggcgatcgaggatgcggacgagtcagcctgattcactataatcgcccaacgattcaaggcccacctcctaccacatggtcctcctcggcaaccatggcgtcgctgctcggaatcccagcagctttgtcatcaaagaacgtctccatgagcatatcgtcctcctccttgctatcagccagcttcggcaggggcttggccgacttgttcacaggctaggcgtacatgcgacgatcagcttctccttaagagcgacatgctcctcgttcaatgtcaggtgtgcttaccatggttaccgtcttgcccttgcccttgaccatctcgggctgttcagtttcagtttccgatgggctttccgatcgcacctttttcttccgaatcgttttagatggctagcattcggaaacgaacagcattgagcgaatttgccctcgatcgatcagaccaggcagatgtcccgagctctcaccttctccgtgacctcttcctcgggtttcgcactgctctcgcgcgacttggtcttgtttccaaagatcgacttggtcgctccgggctttgtcgacacagaggtagcggccggggctttcgatttggtagccgccgagcctttgccagcagacttggacgactccccgagctgtttccaggaagtcgatcagcggggtcattcaaaggaatacgttgacgtcccgtcttgccttttcgacggtagtcatgtcaaagctaccggtcacgctaccgaacacctcgggatcgttgtagttgtctcgctgtctcaatctcaaggtgggtgggaggtactgagctggatcctaacgaaggaagagggacgccagagtttattagcaccggactcgtcgtccgattcttgatcgctggcttacactgatctgggccgaggacaaggagtagatctggaccttgatactgctcggtacgaatagctccagcttacctgagccggcatcagggtggtatcaacacatcgtctctatggctaagtggcctgaccttgcttacttcgaagcgtatctttccctccaaccaggagcattccttttcgctcaacatcctcgctatcgacggggtacggatcgtcctttgccgacttgagcttggtgatctcgggcttgacctcatcgggatcgatcgctgtgtcgtccacctcgttcttgacggctttgggagtggtctcatcgacgtccatctgggtgctggtcggcgtcggcgtgcttggcgcttcaaccttctcgtcggatgctggaacaggagtcgagctccggctcttgataggcaggtaggtcccggtcaagaggtaggtagggaacgtctccggattcgccttgaagtaccggacgagcatgctaatcgagtcgagtgtgattagactttgacaaggcggagccagtgccacgccgatactgactttttcgcagtattgatatttactccgacctctctcgagacctcccgataagtcacctagtcatagacatcagcttcgatccttgccgtacaaccattctataagactgattcacaatcttatgttccaagtcaatccatctggccagcttgtcctgggctcgcttttcctgttctacggtcgccatcgtgaaggctgtacgatctgacttggtatcgtgaaaatcggccagttgtggatgcaattagcgatatgtctatcgattgccgaactagctgtgcttgcaacacctctacaaacaaatcagtatcgatcctggtctcgcaacttgaatctgcggccggggttcgataaatcgatccactcgtcgaggacaacagaaggacgcgacgcgacgtaatcaaagcgcgttttgacctcgacaaactcatatgatcatggggtttgcctaacaaactcgtatatcggctcgaccagatcctgctcgagcgctcaagtatacgattgacccagccattctgtacagatacattactgatcagacagggcggctgaatgtagttgtatcgtgttccgccatagaggcagcgacaggctcgggctcgcgcggaagcaaatgagccagctttactctctcgagcgatgacgaagcgatcaagctttcgagctcctcaaatgtgttcaagggtactctgtgatttgtgtacgacccgtctgggtaggagttgctctaagaagactgcaacatattgtccagagcatcagagaacatgtcatcttccctcaacatccacagagcttcgcaggaaggtgcgtagtttgcttgctctaccctcacgccgctgcacgctgaatccggtgcacctgtacaggtcaaatcggactcgttcgatcactcctcgggcaagatgccaaactcgtcaatgacagggatgccgtgagtcttaaaatcttcaagtggagctgttttgtatgaggaaagctcgctgatccttcgtttcataggacaagcggacacctctgcactgggcagcggccggggagaacctggcgatattacagttgctgttgacgtacgagccggaggtcgacgcaaaagatgagagcgggtggacgcccttaatgatcgccggtgagtaaaacccggacgcatcaaagatatttcccggtccgacttgagagctaaatctcccgatcttatccttgctcctcaaaagtctcggctggacaacctgatgtggtacataccttggtcgaagcgggggccaaggtggacgaggagaacgtgaaaggtcaaaccccactgtgagtcggaatggctacaagaaggaagtttcgcctgcagggacagggcagctgacggtcattcgacaggttctatgctgcttcgaagaaccacctgtcggtgagccggccgacgatatcggatgtttcgacctcgcatactcactcgctttttgacgaatgcttcacagatcggacgatatctgatcaacaagggcgccgatgtaaatcttgccccgtcgtccccgacgattccgctccagcgatcttgaagctgaatatccggctggggcttgttcagatcaaccacaaggacagggcgtctcaagcaccgttacatagggctgccacgaccggttccgtctcgctactacaactattgctgaatccgccagagggacgtcctaaaacccggctcaacgggatggatcgagcaggtatgtcgctgccaggcttgtcgatacccaattggggcgtcccagccgattatgcgcggtttagtgattacgcccaatctctgaacgtacaggtaatactgcgcttcacctagccatggagtcgggacacggagaggctgctatcacgctgatcgaggccggagcagacagggaaagggtgaggacgcttgctgcatgatttgtgcaccaagtggctcgggcttattcggtcgactctgcatccgtcacagaccaactctgacggccagaccccagaagagatcgatggcgtcggagagcgagagcagaagaaggtgcgagactatgttgtatctcgggtgggacctagaatgggatagccagtgagctagtggtcaactaaagtcggaacatcccatgcgggattcgacgggggtacttcagtatgtaaagtcgcaactcgagccgtatagtttcgggtcggtccataacaaaaggtttcgacacgtattgaacgctcaacattggaccatttcgaatccgttctcaaatggtaccgggtctaggccggtgtatcgcgtcgtgaatatacctctctaggtggtacggggaaactctgttgtgactgatatccgaagtcgcgacccgatcgctcggcgctaaaaccattcgcgaggcatttttttatcagataaacgaggggagcaaatgtgatcaacaccaaggggggagacaggaaacgagcgaggccaggggaagaggctggtttggaaagttgatccgacagactccgttacacaggaaggtcagctaccttttcgggcagaagtggaatccatatcgattcagatcgacccctctggacgaccatattgcagacttgcgacctacgaaccgcaagtggcagggctgtagtgcctgacaagcgagcctctaaccgatgctgcccggaatgcagcatgccagaaataaacctgcctgaccataatcacctggtgccttgcatgatcggtgaccaggctaaggcgatcaaaccttccaaagtctgtcgaggaatagattccgtggcgttggtcctcgggatcgggagagggagcactggcaaacgatactctagctcgagatcgtttctatttttttcctccaccaacagttcgtgacgacttttgctccgcctcctaatcagataaaagggcggttaggagccgggccgccatgtccatcagagggcccgccccaatacgattacatatagccttgagctgcaccgtaatcctcttcatatccggcttgttcttccacctcggcactcggtatattccatatacgtacccttacgccatcttcgcatctgatacaatggacagcagagctgtacacctattagccactctggctagcaatgccaccagcagtgcgaccaacggcaccgcagcggccgcaggcggtcacaaggtcgtcgcaaagaaacccaagaagcactattacttcatggcgcgaaacagttgggagacgatcgccggtgtcatcatcgcgctcgccttcatcaacctcttcacccgcggatacgcctactggcgcaggaggcgcaacgccaaacagagcgcagagatgtttctcagcaaggcagaggtcaactcgacaggcagtggcgatgtcaaggtgtcgaggattcctctagtaggcgtcagcatcttgcaaaacctgggactgtgtaccactctgcctcgatggctgggcggcgcgagccttgcagaactcttctggatcatcggatactgtgcggccctcggtgtcttctccttccaccagagtaagcgagaacggtcgaggctaccctaattgtcctcgacgttgacatctcgacaacacagccgtggtcggaacgccaggaggttggggtaaccaagcgggccacctcgccttctctcagatccctctgatcattggactggccggcaagaacaatgttatctcctgtaagatcagcgcttcggaactcggctccacgaaatgaactcatttgaacctcactttagtcctgaccgggatcgggtatgagaagcttaattaccttcaccgaactgctggacgagctaccttgttcctctcgtggatccacgtccttggtcgatcgctcaaagggtaagctgctgatgctgctggtgaatgaaagtgagctcgggccttacgattatacttcaggtacaaaggaggtttcaagcatgagctccaggaggaggcctatctgcgctgggtgagtctttgctatccagtcgcacatttccggctttcaactaacgcctttcttccggaacagggaatcgtggcgatcgtattcttcaccctccttacgtttgggtccttccgaagcttgaggaaccgcgcctacgaactgttcctgctcagtcacatcgtcatggtagccctttatctagccggttgctggttgcactgggctaagtttagctactgggtttacgtgagtccggcaagtgcagttttgcgtaacggcacgtggcattgacatcgatcgaacgacttgcagcccggtctcatcatctggggtttcgatcgcctcgtccgagtcctgcgtctggtcatcctgaacaagatgtggatgttcccctctcgacgagtctcgcagggtttgaccgacaccaaggtagaggttcttggacccgatgtcttgcgcgtcactattcagcgtgacaacctgtcatggcgagctggacagcatgcgtgagtcttctcgataatccgggccgcgtaaacgattcgactaacggcaggttcatcagctaccttatcatgcctaccatctccaagattcctttcgaggcgcatcccttcaccttggctaacatgtccggtatcgaatgcccccagggcgaggcgacattcgtcattcgagcgcgcgacggtcagtccaatatgccggcgcttgttggctagcattccgcttatctttcctaaatcaggtttcaccaagcgcctcatgcagaaggctgaaggtgaactcaaaattcccgcttatatcgagggtccctatggtcatggttgttctcttgaccactatgagcaggtcatgctcgtctgtggtgagtggatccgactacttgactgaaccaacccagcttaaggtacccttgtgatgacaggtggctcgggtatcacgtttggaacttcaaacttgatcgcaatcatcgatgccgctcgtcgaggcgagtcggccgtccgaagagtcaagctcgtgtggatgatgcgggacaagggtcagtccagccatatcgatcatgtcatctgcggctttcgctaaactggcatgtgagacagaacactggcaatgggttcgaagcttgattttgcccatgctcgccggactccccgaatctatcatcgtcgagctcgacttttacgtcaccgtccgcatgcctgtagaacccaatcttaccgccgaggaggcacacgacgaggccgctgtgcccgaggctctttatgaaaacggaacgggaggagactctggcaactcgagtcagacggatatgcaggagaagctcggcggcgaaaaggaaaagtaccgacgagattccagcgcagaagctgcggtgatcacttggcacagcgggcgggccgacttgcatacagtgcttgatagcatggctaaaatcgccactggccccatctctgtcaatggtaaatacacttccgatctcacgttcatcatgaagagaaagctaatctcaggacaatctttcagtgtgtggccctcgaactttgcaagctgcggcctccgaagctgtcaaggctgtagccaccccgaccgaggtcctcaagggccaacggcgcatctcctactacaacgagacctttgggtggtaaagcggaatgcggcgatagatgtgatgaacaacgagacgacagcgtgacgcacagcagatcagctggctgcgcgacgatacccttatagttgaactagtagcgatggagatgtagcaggtgcatgtgcgattgggcgaggaaatgaaatacaatataccgaaaaacgtggaaaaaacaaattggtcatggccgacagacaatcgaaacctaatcgaaccctacaatcgtttacgcagatagcgggagaggcgacatctattgcttcttcttgccaatgacgctagccttgacggatgatcgaccggcagcaccggcagtcttctttttggcaggaagagcgtccttggtctttccagcgagaaccttcttgggctccttctcggccttgggctcgggagtagcagcctgcttggcagcttttggggatgcggcggccttcttgggggagggagtcggcgccgcgactggggtgggttcaaccgcggcctttttggcgtcctttccattcttctttgactttttcgcattgggggccgagtcgtcgtcgcttccggtcatcatgctctcatcgctctcctcacctcggagacgcttcttctcggccttgctcttgactttgacatcgacgtcatccgagccgtagagcttggaagggtcgaccgtccagacgggcaacaacatcgatcccgaggtcttgatcccgatcgacttgatgttgtcccaagcgtcgggaatcttgccgacgacggcgggaagggcagcaagcaggttctcgaggacttgttcggcattgtggtgaacggcagtggctattcgcagagtcctagatgatgggaggagtcaaaggagatgagcattgtcatagacttgttgtgatcctgacaccagacacgcacgaggtagttcccaaactctcgtggaaaaaggcagacgaaatggcttgtgcgagctctgtcttgatgtccttctttttcaagttgacagggaggggttgtctatgcacgacacggcgcaacccggatcagtctagtctcgagccagccgccacggacctgcatgtgtcccttactttttagcatcgaaaaagatcttgcccaacaacttgggcatcatgggcatgatgctctcgtcacacaagaacacctggtgatcgtttgccaacgcccgcctggcctcgtaaggcttgtgctttcccttgagcttttcgagaccgacgacacgggcgatgaacttgacgccctgctcgtgcaagaggtccttgtattgacgttgggggtccttggaaaagagacagaccgaggttgttgggggaggaggaaggggagggtgagggaggttactaaaggcagtaccgtcatgacagagtcgtcagtactgatacgctatagaataacgctacttgaccctgcatggcatactcacattcggctgggcttgttgctcttcttggtaggcattcttcgggtgttgatgaccaaccaaatgtgttcatccttggagataagcgtcttttcctcctgtcgctccttgtccttgacatggtgggccaagagcgccttgacggcctttttcgcctgatccttggaaaagttcttgggcaactcggcgttgaccttggaggtcgaagcggccggggtgggctttacgacaggtgcgggcatagggatgttgggcatattttcgatctgatgacgggagttatagtaatggaaggcaacgtcgaggcgtatcggtgttctgatgagactgcaagccgtcttgactttgaccccacctacctggactaatcagtgctccttgccctctcgatcccacaaattcgtcccaaagttgtctcttcgcgatatttcgaaacgaaaatcacgtgatcaaacaggaaaacggaagtaaattagattccgaacacacagtactacacagtcgaggagaggtgggatatagatggttcaagtacgcatgtattattcagagatatatatatttacacgccagatgcgcaagttgggctcagctctatagagaaagatacggaaagaaacggtgatcgttcaccgccaacgttcggtcggtaacgatcgaatacaacgaggtgcccaagatgcaagacagagaaactagtcgggtcgtacaagaatgacatacaggtgaacggagttgtagagacacggttcgggtcgtggaagagcttgtgtatatgtgtgtatccagtttgcggtcgtgatcctcgttgctacagcctggtatttcgaagaagaaagagatcgagagagagactgagggatggggtatgtttcgatctcgaaggtttgctcgagcgaacgagagcaaccgattgagatccttttgcaaggcagttccaaaagtcgtgactggcccgtttctaatggctagtaacgaaattggtggtagggttgcccctcgtaccgaaattaggggtaccggagcccgaggtcgaggtgctgccgctcgatcccgcggcatgacgacccaacgaagccggctgatacccaaagtaattgtcgctgggtagcccatgaccggtaggagtcgtgtgctgactgctggtcgctaggttggcgtactcgggtccgaacgggttgaaaggccgatgggtaggaggcatccccgtcggcgtcgtacagcgagattgtacgggggaagaaatggcggctcgggattggaaaaagcaaaacttttcgacctgtgacacgggtacagacaacgatcagatttcaaggtggcagttgtgtatcgacacggttcggcacaactcacgaattccttgtatcccggcgaatgaataccgctgttatcgttcccctgcatagccctggctcgatcttccaggtgtcgatccctctcggttccgtcgatgaccacttcagggaggatgacgttcgaccggggcgggctcggtgtcacgctcggcgaagtgctatcggtcagaggggactcgggcgtgacttgcaagctgttgcccaggggtggagtagagagagccgaggagggaggggagaaaaggtctaagccttggacggccgggctcaagggcgcttcggggtcaaccttttgaaaatccacctcgtctcgggtcgcggtctcgccgccgtccatcttgacgggcgccgacccgcttgtgctctcggtccacacgggtggactatcgtcgacaacctcgccgccccaacttcgtcttcgctcgtgacccttgcctcgaggttcaggcgcgagcgtggcaggcttgtcgctcgagatgatgctggccggacggcctcgaggtggttccgcatcgtccttcgcaggggtcttgatgattggaatgtcctcctttggtggcgacgtgggcagactcggagcacagtatcctttaagggacagatgctcatgtacgtcgggcatgggaggtgcttggaacgccgtgtttcggaaagcaggcgtgtcgggactaggtccggggggaggagatggtcgattcgactggcctagcacgcctttggaaggtgaattgctggggctacccataccgggaaagttccatcccgtcgcgcgaccaaatcctgatgctcgcatgcccggtactggtggtgttgtcagagcagcctgtcgaacggggggcgattctgcctcgccgccgacctcaaacatagccctttgccttcgaatcggcttgtatttcttgaacgtaaagttgtagttaccgccttgtgaccccgagtcccaccattctttgccttcaaccgagaaacggatgcacatgaccaagcgcttttcctccaattttcggcggaagtcttcgagcttgatcgagaagctgaaccgatcccagccttcgtcaccggtactcgacgcaggaagatgaaccacgtgcaacccagatacttccgatacggttctgggaggacagacaatgtcaacctgagattcggtgtcaagactgcaggtacactccactcactgccaatcatccatggtgaatcgtacggcgacccatttctgaaaggctacgttcctgaccagaatagttcctcgcaatgataatggctcagacccggacgacatctccactcgctccagcatgacgttgtgatccttcagaccgtccttgttcatgggcgaaaagtcgagcctcgctttgggaacgacactcgacccttccccaaatgcaaacttttccgcctcgtcctggttctgcaaggctgcattacgtttcctcctgaaagccgcatactctcgagcgtccgtgtccgcttcagtctctgtttctgtaggcgggtacattccttcctccccgtcggcggtcttgctcacagccgtgaccttttgctctcgcaagaagagcacgacgctttccagcctggctccctgatctcctgcagacccggcgaacctgacgttcttgtgtcgatcggatccaaagtctcgatcgtcctcgcctaatgcgggcgtggcaggttcgctctttgagcccatcatgtcaccgcggagaggaaggtgaggtgtcgattgcgacctaaccttgagcgaaggcttgacaagttctccgctcttcttcctgatcattgacgaggtcggtcggttgccttcccacgtggaagcgtacggtgtcgagttgccagattccatgtcgtgataatcgattggaggtgttgcagggatatcgagttgaagagaagacgatggctgacgtctgagcccaagactgggcccggatcgagtagtatggcgaggattgatgacgcgatggatagccacattcgatttgagcggacttgcaggggtgggtattgtgacaggaaattcctgttcggtgacgctagccgatttagggaacgggatgaccgactccttgtccttttgtacaccgcttggtagacccgtcgaatctggtgttcgatcgcgactgggcgtgcgatcatacgaccttcgcctcggcaacccgtctaccttcgtcgtatgcgcatcgtccgcgtcaaaactgacgtcaaggtcctggctcgtcgtcctgcctcgagtatggcgtttgcgtttttcggctgcttcctgctcggcagcatatcgctgcagactcagggtgatctcatccatcggggtgggtggaccgttgctctcgagtgtcgatactgagctctgggaatccctgaccggtcgagagatgccacgtagacccagcatgtcgctcttcttgttgcctctccggtcgatcccgctcatcgtctgaccgtgcgaaggactgacatgtgtgctgctaacacgtctaggtagagcgtgtgaggtcgaggcgatcgccgatgggctagcagcttcaaagctcatcggagtcgccaagggagaagtctgcctcgatccattcctgctcgaggtctgcctgcgaggtaggaccgtcggccccgtcggtgtggatggtcccgagtgaacaggagtaatggaccctgaataatgatgccgtctggaccatcccgggcgggtgtgtccgtcttccttgggcacctcgtccttgaccgtctcgacctgatcatcgtcttgcatcccggccgctcgctgtccttcgacttgctgcagtgcgcgttgcaaggctttctgtgcctcgaccttgctcagcaagttcgctccttgactttgcccaggaaagctgatcgattcggaccgaggcgaatggagcagcgaggaaaaccctgacgagttgatgggagatactggtgatgtcggttcggcgtagggcatcgtgatatgtagactgatgtgtgacgtagaccgatcggtgaaaggtgaagcgaaagagggcccagaggctaaaggttgatcgttgttgatatgaatgcaatgtctcgaggtggattactacgaggctgcgaaaggaaagaggccgacaattataggatggttgatgtcagcgtcgtgatcctttttgaacgataagcttcgtctcgagctagaccggggagtgatatggtcagtaaaagagagagagagcgagagctaatgggtagtgctggtccagatggagtgcctttgtatatcgcgggtcgagagccagcagtccgttttagcgattcgggccaaggacgatcccgctcaagtgtttgttttttcgcttgtgatgacgcccttcggtccagattaatgacgcaaccgtcaaccaattcgacaaaggatgtcgtcgacttttgtgcttgcaggcaaaaccaagagcaaccctcgagtttgattcgcttgtgcgtgcttgcttgcctatgtgtccttgtatgagcaggcggatccacccaaggaaaggcgttgggagtgtcgagtttgggagataagacgagcgagagcttgacgcgaggtggatacaggctttgtttggtttgtgatccgtgatcggtaggctttttctttcttcctgttgatgtggtgactcagacgggaacggtcggctagcgagcagggtgaaagacgatagatgataggtgaagcttttgtaagatcccgtcgaatcgatttctggccatgagcactactactgtatgctacgtgctacgtgctacgtgctacgtgctacgtcgatttcgtcggattttcggatttcgggtctgagtcgacaaacgatcccgctaacagctgactcgctcctccctttgtgacctctagtgcggttgatcgtggatcccgggtggatatctggtggtgctggagcgtatggtgtcgggcgaagatccaggtggtgtcgctctcacacgtgaggatagtcaacacactacttttagtgacctaggaacggattatccagctcgtcgttgaatgcgttgtggatgcgaaagagttgaagcggtcgcagtgtgcgttatgtaaattgtcgaggtcacgttgctgcgatcacagggccctttctttgtctcgcgggaatctgccagtttgtttctggcttttctggttgattgcgatgcgttcggacgaaaacggctcgttgctcgttgcaagacccagctcggaaactcgaccggtgatacgatgcgacgcggaagttgggcggccaagaggttgtccgggcgagtgatggggatgtcgagggattgatgagacgattctgctctgatcgggctgacgtgatccaccgtgagagccggtatacccagatctatggatcaaactggagaccgtcggctcgcgcggctcgagggtgtcgtttacagttggtggagcgcagaggtattcgtgaaagtcgtaggatctgctcgtgtgggcgatgattggggatcgctttcgcctgggacaagatgacctatatcgaatcccttcgcagctgatgggaagatgtcggattgaccgtgaccaggtgtttactttgatcgagctgatccctttgacggggatgaccggtatcagcgcccctttgactcgcagcgatcccaccgcggtgttgctgcggtactgatgccccgctgtagatcccccatgttcaagtggatgatcgtcagggtttcgggggccggggcaacgcgactcgtcgtacgcccaatttcatcacttcatcagagctggtcgcaaatcgaaggccaaggctcgatggtgacgtatgaagggatcggcctcttgcctcttgatgtccatcttttgttcttctcaaaatttggtgtgcgggtggaaaggtgccatgccgtccgtcccccctggtccgcgtcgtttcaaaccgtgttcccatcacgcccatcactcgatcacgagatgtgtgatttcggatctttcgtgtttcgttcggtgaaacagatccccggctcgaatcctcgggtttcgcccttgctgccacctgaccagatgatgtcgatcctcccaagtcggaccaccgtgaagaccgatgggtctggtcgtgcagaccaactaatcgacccgtaggctcctgggcgtgttcctcaaatttggcgtctcgtcccagtcgtcccgatgatgttcttgttgtgctctcgctctcttcttttactcgaccacgtcccggtagccaacgagacaaagacgactcacctatagaaccgcgatatccctcatctttgcaactgatttcctctacacgcgggagtgattatctatccttctgtccttgaccttgtcccgcaaaatcgagagctatggtctacgtgaatctgttgatcctgatctgtggcaagagctctaccagtcgagcacgaatgagagacgtcgataagtcaaggtcgactcgtcgctgggttgtcgtaggcccctgatcctgaattggtcagatgtccttccaaagtttctttacgtgccggtccgtgcttgcgtaacgagcggagacggggaggggaggagggaatatggccgttttgcttgtcgtccaagcgagaaccgtgacgagcggaacgtgccgatgatgatccaactggagactccttccaagggttacggatcaatggttcggggctctatctcaagatgaggggtcgacgacgataccgaccggtcgaatgggttcacgtcttcctagagcggaatgggcaggtctgtcgcagctgatttgatcagaacgaggggcaggcagagcgggaggagattggtgtgattacccaacccaagtcgaaaaaaggcgttcgtagggtggccgccgtcgtacgtacgcgatgccgggagggatttctggacgcttttcctcgctcgcgagccgtcggggcgtatcgttttgaactgggaatgacgtcctccctaacgaggtgatacgcaaagggaagagaaaagggctccagacttgtagcaatgatgaacgttcgagggaacaactaggtgacagctcaatggatatgccacgataagaatgaattgcgtttgcgctcactccccatgcacactcatcgggacttgccgcaccccatgagacgcggtgatcgagcatgggaaagtacggatgcaggtcatagtgggatcctaaccaaggccagccttggcggctactgcgatgaattgtgaattacttccgcgggctgcaacacaagcatgggatttagacaatgccgatgagagttgcagagttgaagattctccctctcatgcgataaaagcggacggtatgagcttgattatgaggagacacggtcgtcaactgctgtactctggcgcgaatcgtagatgtggtctcgtcctcgcgtaaccagcgcgccagggtgcctgatccatcacacgctttctactcgatatggtgctaccaggcgatgttcatgaggacactcacgggtcagcctatcactgcgagttccaacccactgagctcgaagaccccgctcggcaatttctccagctcacagctcaggcacgcggccagaaaatgaatcctgcatcgctcgaccaacgatctcggatatgaactttctatataagcccatggatcgtcgtattgttccgggctggcagcagcagacgcaaatgcgttggaaaattaccggcggaggaattctgaacaaagatcgaccatgcccaccatgtcgacgggttcagaaaatgtgggcgtaaaaaaaccaacgcgttgattccgccaacgccgtcgtgaacggggcatacggggtcacggtctgaccagtcgttctcgagccggagagagctcgacaacaaagcttggaccgattggactcgatctgcagggtaaaacacgtttatagatgtgagactctgcttcacagcagtgagtgtccctgtctcgctcaagtcagctcgatccccgcctcgcgcaatcgtctcgcggagccgatgatttgtccccgccccccctagaaagccataggggacatttctcgttcacgtcgccattcattacagttccgctgtggcgggggcgacgtctttctctgagataagctggccaagaattaattccacttcgggcagtaggagtagagtcgtatcagtagcatgtccgactggaggaatgcgaaacgaagcgagtcgttctagaagagccaacgccacatacatcagcgcttaggtcataagatcatacgatagatctcgggaatccaagaaactcggctggcaaccctgcgacgttcggttcccacggcgaggtccgagaggcgcgaagtcaaagagccaaaaagcagtcgacgcgggcgcgggcgtcgctccggaacaggaaaacctaccgggagcagcttacgcaatctcgctctcgcattcttggcgacgatgcccgaacgccatcgattccgggcgttaaagggccgggatcggtaaatccgggttagatcagcgatttcaatccaaagagtaagtaggttgcgagatttgatggaatgatggtgtgatgggcgtttcatgctcggtcgtggcgggagatgtggaatcaagtcaaagacgatgagacgtattccgtaggctttcatttagtgatgtcatggacatatgagtatgacgccttgagtagaatgaaatccgtccccaaaatttgatcgcaccgtgttgccgtgtgcgttactctcgtccttgcatcaattatcgtccgattcttgctgtacggatttaatcttctgaaagggaccctctcataccggcatgcacacacgccggagtatttcaggcggaatcgtcggtcgtctatcgacctttggaaacgaaacggctgcgccgatgtcagcgaaacaagccttacgtggacgtaaagggtcgacaggtttcaactactttgcaaccatacgtttccaccctgacgatccgatcttacgagctcgtcctcttgcgacaacaaatctcccccttccccccttggaatccggctgaacccctagcgatctcgaggaggtacaaaagatctcgagtagatcgcgcgtcaatcgacacgcacgtgaatctttgaccctctcgcgcttgtgccgccctttgaacaaatctcggttcacagccccgcgcgcgcgaagtttgcttggaacttcgagctcgccatcccccgaccccccctttgatccggtcgacattacattctccctcgcaacttgccgcctcgtaacatccaatcatatacccttcacactcaaccccacacctcggtcgatctcgccacaaggttctctcagaggccaagacgtcctttggtcgagagggatggtgtatcggtcgtggtagtggtacgagcaatctctcctctcctttcgcggaattcgacctagcaacgtgcgacctctgtttcgctgcaaggatgaccctctcgtctccgctctccctctttcgacggttctcgagaaagaacaaacgtcagccttcggaaccggtagtccagctaccggtcgaggacaccttgaccctaccgcacggcgagctctcttcgtccgacaataccgctattcacagcagcatctgtgccgccggcacgcctcttccggatcaacccgacaagggggagaggaaacgggtcgccgagcgcgttcatggggatgaagacgcatcgtcacctcgccgatggacgagaaaggtcgctttcgacgagcagcatgtagaggatggtcctacactgtccagttgcaatttgttagtcgcccttcttcactcccatctgagcccggtcgtcgatcgctgtctcggcggaagctgacgtcgaccatttcgcgggtgtttttcttcctctttctcctccatgtggcttcatacgtctctgcatactggatgtcctttttttaccttatccgttcaatccacaccgatttgttcggtgaacgattgccttgacgtcaacggcgtcctcggtaccacgtcttttttcggcacaatcttcgcgcgatccgcagtggacgacctctcacccatcaatctgaatgtgagccgccatctgagcgacatacgattaccctcgagccaggccaagacgggaaaggatcgtctatgacaaccgaagctggagcgcctcaagctcagaccgaccgagtgacatcagcatcaggtgatctcgtcagcaaagtcggaaaccacgcggaatttccaccgacacccagcaggatggccagtcgaaagctaatcaagaggtctccgttgcaaagggattccaagcccgacccgatcgatacctcaggtctcgttcgctccaagacggatggtaggaaccggactcgatccgaggacggtacacgggctgcggaactggtcaatgattcgacgaggacgtcaccgtggaggacgtgggggagaaggaacggggagaaacggactaggagcgatgcaccgccgtcggcttggattgggaacaagagcgtcgctgcggagctagcgggatatacggttcagcaagcatcaccgccaccaagctctttcagccgacgtctgaccaagagcataagcttcagtcgactaaaggagccgaaggtcggcgaggaacctgagcaaatctcgaccaaagggaacgacgtcgccgggttcgctcgcgcgttggaagctaggaaagatagaggaaaaatggaattggtgcaaactcccggagaacatgtctacgggatcggttgggcggtacccgaggattcaatcaagccttatatcctccttcgaccgctgtcgccaatgaccatcccggctccagagctcgagcaagaagacaaagaggtcattctgtcggcttcccctgatcctcgttcgccggaaacgccaatgtccgctctcgagttgaactccgaagattggcatttagcggctgggtcgacagatacacatgcgacgactgtcttcgccgagtcgtctaggtttagtgtcgattccaactgcaccccggccttgagcatcgtgacggggtctttatcaccgtccgcttgcccgacaaggcaaaactcgctcaccatgtcgccggcgttgttgacaccgacctcgacgcccatgttggtccatccgtcagaattgctctaccgcaagagcacgacggccagattgcccaggttacagcgtgctcttgctatgagccagatcagcgtgacaggtctagatgacgagctcggcgagggcgtcccttcggagcaggagatggtccgactcaacaagatggatggcaagcgaaaaaaccgccagagcttgatgcggatcgaggacgacatggcattcgccaaggtggtcactgaactcatgcgagcggaaaaggaggaacaggtcaaggaggaagagacggaagggtggatgatgatgcgagacctcgcctcgcctagcttggaaataaccaaacatgccaagacgatgcgggccttcttcttggtcagagagctcctcataggggagcggaattatagaaagcacctcgtcaagggtatcgaggtaagtcaacgtgttgttaccccttcgccgttgacaagatctgacaagtcctccgatatttcctagatgttgatggaagataccctgcaaacacaaacctatgccactggctacgaatcttttacgacaaactcgacctcaccatcgaaactcacgaaacaacagaaacgctcgacctcattcgtcaacttgcctgtctacgcagctggcaaggaagaaccgtcgagctttaccaaatccgctcccggaacgctcaagcgagaaaaccgtccccaatcgttctacgtcgctcgatccaactctgacttcggcgagcgtcgaaatcgaactttcagcgatctgacagcgcttgctactggaagtcctccagaccgtcagaggatctgtcaagatcttctcaaacatatgcgtgacttatgcgttgcttcccgtcgactcgccaatggtctcgaatttgacccttcgcccaacgaggcggcagctatgttcctgcaaaacgagtctgacctgctcgcagtctacagcgagtggtccagcattgtcggagaggcgatgctgagtggtatacctaccaagattccgattcgagcagctgctcgcagcaaagacgcaagccggcagaggaggagaagcttgagatatggtagtaaagacatggacatacctgcaggagagctgttgctggccgacattgtgagtctggtccatagcaacgttcgtctgctcgcggactaattccggaaaatcccccctctccagattatcaagcctacagcccgtgcaggccaatacattctcctatttcaaggtgggtgtttctctctgcgcttccgttttgacaacggatgctgatcgcgtcacctcactttttctcgcttgcagaaatccttgactgcctcgtcaagagtcatgaagacacgactttgatcgaggcagctctcgcttcagccaaacgactcgtcgccgagtgcgatcgccgccaagctaccgacatgagcactatcgcctcacacggcgtcctttagctttataatttctcgaatcaatcatctgcatcacgaatggtaccgttccggaacttctggggtgggcaacctctcgctggatccttttggcttcgacatcgctttcgactattttgtacgcacggccgccctccgcacacatcaacgagtgggcttgtcctgttgccttccgtcttttcttgtatccatacacgtttctctacatggcatgattatctttctgaccgacaatgcaagaatagcaacactcgtccaatgcccatctagtggtattgtgacctctttcatgattccaagatacgcgagtcgcgttgcacgtgaaagatttcctcgttcccggacgtttcaccgacccagaacgcttgcaaggcaatgagatggagtcgtatccttcgatactttgtcctatccgcacaatgactgtgattgcaaaatcgagtgcactcaatcatctcctcatcaaatagaaattgttggcgcctattggacccttcctgccatagtctcgacacagcgagcacaggcagccggacctcatctcgatcacacgactttaatcacctgaggagaagcaaaaaaggtgaagcaaccaggaaaagcttgaggacgactttcggcagtcagcaatggcggatcaatcgcagcatgtggtccaaatcccccaggctgtcaatatcgctgcgtctcaggatgcaagcctctcccaagagctgcgtggccaagcgattgagtatttgaccaaggtcagggatctgagcgaggagacttggaaggtgagctgcgcaccaggaatccgcgagatgtggtgctgatgagtactgtgtaggcatgtttgacgttgtacttgcaaggtgccggtgcaagttcggcgaatcctatcggaagggacgggaaggagaaattatcgcacgagctccgagtatattgcttgcaaatcgtggatgacgttctcggaaacaagttggtcgacattgagtggcctcgaagccatgcagatcgactgacagtatcattcactgatagaccggaagtcatcgccgagcaagatttgatctcattacatcaggctctcatgagtcatgtgcagacggagtttgtggaagggagtgccgaattaggcatgagctgtaagaaagagcgccgttggcttaagggttccttacagcaaacttacctcaaatactcctcgtgttagtcatccgaaacaagttttgctacaccctcaccttgtgcttccttcgcctctatccatccccagtaccggacttccttacccccttcctcactttcctaaactttcctcaaagctcttctcaggcacagaacctccagcccaccatcatcactctccgcatgctctgtgaaattgctgccgaagtgcacgatccgttacttaagtcggcaagaaaatggacggcagaacggaactcgagggacggtcaggtccgagatagtcttcgcatccgaggagaggtgaagatcatcttggatgggctggtcagcttggtggatcagggtcttaaatcggagggccaaccgatgatgcaggaagttgtggagtggtcgatgaacacactagcgagctgggcacgtgagtcaagacgtggactatgttgaaagagatcttcgctgagctatagacgatatcagcttgggtcgacataaatgcatctgtcacgcccgattctttggccctctatcggaagcttgtcgagcacccttctgcccgttacaggaatgtcgccctcagcgtctattcgatcttgcttcacaagggaaccaagacatcggcagaaaaattgcaaatcatacaggttctcgacgtcatggcttttgtcaagcctctggaaaagaagacgaggctctctggtaaagcacctgcagatcaggacgatgaggaggtggcgttcagggtggctctgggtaaggtgctgtccgcctacgggaccgaggcattgaaaatgagcgaagatgtgagtggcgacttcgagatacttgaccatagataagaacacttatcagtcgtgcccaaatctataggagtcggcagacccggcattacgatccgaaacggaggcgatgtgctatgcaacattaccgatgctcttgaaatttgtggaagacaacaacaacgacatttacgaggcgatctcgccattactgactgatatcatgcgaatcgtaagcgcaaacaagtcttacaagaaggaacgactactgatacaaggcaatgtacagtataagaaggcccgaaaggccaacgagaatggttacgttttgcctcaagacaaggctcaattctttgcgacactattggaaactcttgttagccaaatgcagtggccggtagactcggaatgggatccggccgatcctggggaagaagaagacgatgattacgaggcatttaaccagcggcgaatggtaagtctggatcgtgtcactttcacgaagtcactgctaacacgacaagcggcaacattagcgaatacgatcggaaatcgaccagattgcacaaatcgactcggaattgaccaaaagcaggatcgtagcgtttgtctcagaaacgttcaaccagatccaatcgcggggaccttctgccgtatcttggcagcaggcggaactggcggttcacttgacgtatatctttggcgaactgcaacgaacatgtatgtccttgtcaatgacgagacttcgaaggccacgctaatggtcttttggtcactcgacagcgactcagggacgggagatcttcttcaatataccagtcgaggtcagcaatgcgctcagagaaaaagcgaaggagaaggccgagaggtatagggaattaaacgcaacaggggaaatccgaccggacgctcaactgccactacctaccagggagcacgtagactttaatcagttcagtctcacgcctcagggccaaatgctcgagcaaggaatacaggccggcatcttgacttacccacattcagccgtcactttgcaatatcttgaatgtgtttcgagatactcggaattctacaaatgcaaacgacagcacatccagtcggtattggaagccttcgtggaccaacggtcggtgtccagggtgtggagagatagcgcggccgtttttttttccgcttacatcttttgcaatccatctcaggggtatacacaatgacaagaaggctgttcgacagagggtcatctatctcttttcgagattcatcaaagatgcgcgtcgatacattgacaaggcattcgttccagcgattttgaacgggatcagcgtaagttgcaagttctctcttgtttctcgatgtcttagattaacattcttggatattcaggacgccctcccgatcgttgccgtcttacctgaagtggagaaccctggcgatgatgtattgattaaggctaccaccggctcccaaccatttgacacgcacgtctacctctacgaatcagtcggaactttgatctcgctcgaacgcgatccggatcaacagaaccctatgctccaggcagcattcggtcccctggttcaagagttggccagcgctgtacaacgatcagcctcgggcgtccaaccagagctcgtacaggtcttgcaggtgcatcatgtcatcatggctatcggcgctttcgctcgaggtttcccagagccaggcgaagtgcctccccccaccgctccgtcgtgggtggcggctttcgagcagccttctcaggctgtcctgcaagctctcgaggcatacaaatcctacaggatcatcagggatgcggtaagcgccttggtgggaggttcgcccgtgctgagccagtaactcatcgacgatggccattccgacaggctcgttccgccatggccgggatcatcggtgcattagcgaccagggggactcacctggttgcaccgctcgtgatccagaccgtggacttgttcgaaccccaagaacttttggaattctttggcttccttgggatgttggcgcatcgacttcgggtgagccgggacgtggcatatagtcttggagcgacaaacactgacgtatctccttttgcaggccgatatcaagcctatactcgaggaattgttcccgattctcttcgaccgcgtgtacgcactattggcgacctcagcgacgggtacagacgaggccattcttcagagcaatatgaagaagggctacttgagctttctgcagaccatctttaccgacgagttgcaagacatgttcttgagcgatcgtgagtctgcgtcttatggagtggatcaagtcgattccgagctgattttgaccactgtaatcgacatggcaggtaacaagccccgtctggatgggttcatcaatcatcttctctcgatcgccacggacaagtcggaacgtagcgaccgatccgcccagaaggcggccatctttttgctgatgaggacgatccagacgtgggctgctcaacctggattgcctacagcgttcttgaccgaggccgccttgctgaacagggagagcaagaagcagaccaaagtgaatgggacggtggtcacgagcgggccgaccgggtctacgacgacgacgggtcaggtcgtacccgggtatgaaacggtggcgtatgaacggatcttgcctgccatgttccagaccatcttggatcccgagttcaaagccaaggacggccaggctggtttggtaagccgtcccgcgagtggcgactcgagagagatacgcaactcatcaccttttctcctgcacaggtgattcacgaagtcggcaatctgttgcgagaggtcatcgcggcgagggggaaagaagccgtcgattacctcgggacgcgcttattgccgtcgaccggatgccccccggctgccacccaggaactcttggttcacatgaggagcgagacggtcaaggatttcaaaaagtttttcgccgatttcatgaaagagtggaaggctggtttgggttcgggatgagcgatttgataacggtgaggcatacaacgcagcacgagatgtgatgtgcaagtaaaggggaaaggaataaaatactaccactcacgtatttgacatttaataccatgaacacgaccatgaccgtcccaaagtctccctctgatctctgttctgggtgtgcatgtctaatatttgtgaaatttcctttttgggtaatttttcatttcagactggtcagacgcgcgcgtgaaatggcgggaaaacgcgtcttttgttcaaaggttgatcgaagaatctacatgtcatcatctcattcagcatcaagtctatacatcgacctctactcttctcgtcacacaactcatcccatcacccttccctcctctcatttcttcactcatcttgaccgttagagccataaacggatagatcgagcgttttctctcaaccaaacaaaaagctcgtccgaaagagcacgggtttcctttcaacttctcggatcgagatcgagaccttcttgcacgattatcgcctctgaacattgctgtcggaatcgatcagaaagctacaagaccaccagtacaaggcaagcctcaataaatcggtagttcggctgggcagtgggtcacacctccgataccaaagaacggggaacccccggtccaaaggacctacctcttgcggcctgctgattcgctcgagaagcggagacgggcccttgtcatcgactcgtctcgtaacacccgaaacgacttgaaaagcgatatgtacaaccccttcgacctaggatctacttttaccaacaaccgccaaaggaagcacgatgaccgcaacaatgacgatcccgagggtctagcccgagcaccttccactctcccttctttccccccgcatgtcttcccccacccagacccttcctcctcgtattccgagtctcatccgggttccggaacgaacggaagttcccagatctacccattctccccgccctcgacggtgcacaagggtaccacagcccgagctcggggtaggagggggaggatcgtctcccgggaatggcagccgcagccagacccgtctttacctaccggtccacatgaggtcggaggaggatggatctcggtccatcatgatgaagaacagaggggaggagatgtgctccggacgggaggtgttggtattggtgggaggcgggtcggaaggggaagagcgcgggcggtagattgtattacagggtgagtctgcagtgctgggacgaggataaagtcggtaggcatcggattgactgatgtttttcctcatctcgggatagactgccgactccgccgcaaaccaaggataatcggatggacatgtcgtcccacggaggacaacaacgacatgtttatcccatcggactctctgcactccccccgaccccggcgtccaccgtcaaaaccaaacgcacgatagactaccggaatgcctcggggacgagactagaccttcccgaacgggtcgacgaggaatccgagatcgagattgaacacggcaaagccccgtccgatgcgtcgttggggctcgtccctggacccgcgcccgggtcgggacggacgagtcgaatgtttgcgagacagatcggggtggatgggagttggcaagtggatgttcagggccatcatcataccggatctggactcgcaggcaggaagaggcagaacgccgtcgctcttcaaggccccatcagggtcgtgggggatcggaacgtcgttttccaacctaacgacgaggaggaagatgaactggtggacacggacagggagggcacgccagagaacaaggttgggaggcttgggtcgagcgtcttgttgagcgcggcgccaattccggggatgagaaagggcaacagctttttacaacaactggaagctgtcgctgctgaaaagaagcgggaggaggaggcacagcaacaagaacgacagcgacaacagatggcattcagccttcgaccggcgacggcgtcctcctcgacaaagacgggcgcacccgtttttggcggagatgcaggtgtgaacccattcgacgacgacgaaccgatcgcaataaggcgaccgaccgggatgaaaggtcggctcttgtcgtttggcgaacctcaaccgttctcgagtgacgaagaagacgatgggtatgtgcgtccggtcggaataggtcgacgtatgcccagcccggcgggaatgatcaacttcaagagcaccaagccgtccttgtcccgctcgggaacgtctaccttggacgtgccaagcttctccttgaaaccacctgcagcgtttggaaacccgttcgaggatcatgcagacgcggcgtcgaggcagcaaccagaggctggaccgagttcgcccatctcggccttgatggccggtggtagccggaaaaagacgtggacacgaccggtcgcgggcggagaggacgatccttttgccgagaaaccgggtgatctggagaggatgttggagaggcaaaagcagtttatcagacggccggaaagaccagtcatggagtttaccttgtgagtcgcgctagtccggtttctgatgcgctcgtccgggtgaaaccatgtcgctgacgcgcgtaccttttcctgtcgcagccgtggtcacaagacgtccgcacccaatccgctttacggtctggatgcgacccccttaatggcccgtttgccgcctgctcatcctgaattctctccggcacccattcctcgaccaaaattcttgctcgacaagtttatggctcaggctgaaagcacaacgagggaatcttctgctggatcctcgtcagacgagacgccaagtccgcatttgggatccatgtcgatcaccgcagacggacacgtggtccgggactcgagcgcaacgagcaaacgaaacagtcaatcgatactcggcaaacgatcaaggagtgatcaagaacaggacgaccacgaacaaggcgaggctggacgacaccagaggccccgtagcgttagcgaacaggtagcgggctcgtccaatcctgaaacgccagcgcgaaagcgggtcaggtcgagcatgcatccagtgggaaacctcagtggagaacaaagaggatcgagctcgactccccgatcgacggtcaggaagacaggactacataggttgtaagagagaacgagatggcggtttgtggtggtcgtctgctctcgtattcttgtagtgtggcagaatcattacgatcagaaatagtgtagcatattcttgtccttttgtacggtcgtgtccaagcttgtcaaacgattatgcgaataccatcctccatagacatgaactaaacaggccggctacatctcatcgtccgggaacagattgcaagatgcccggctcgaccattccgtcgccctcatattccaaatccatacggcactcgattcgatgacggctgtctgtgccgaatcttgcaatatggaccagaccggcgtgaggtacgactcaggcttggtgctgaggccctgtggaatcctgtcgtaagcaccatccccgactggcacgatcctccacctcttcccttgagcgagagagacgatttcgatgccctcatcgatatcgatcgacgagacaaatgcgacatcgcccggaggtcccctgacgcatctgagcgaacggacgctcagaaagtcagcggctaggcgcttaagatctaggtgtagggtggtcttgtccaagctcagaactcgggtttgaataggtaacaacttgccgtcgacgatcggtcgactagtatcgaacaacatgagctgacctagacctcgacaaccggcaaggaggtatcttccgtccgccgagtagtcaaggcagttgacgcagacttgctccacatcatacgaccagacctcgtcgccggaatgtagatcccaagctcggatcgtcccaccattgtcgaccccgaggcagtgtggatttgtgggacttatggcacccgtcacgttctgcgtgtcggtccgccaaacgtgaagacattcgcccgtccccggatgccaagctcgaaaggttccatcccatgaagcgctcacgaggatacgatcgtccgcagagaacgctatccagacgatcatgtcccgatgacccgacaatgtgatcgtctcgtgagtatcgaggttgtacaagtcgatgtcccactggtcatcgtcgttggtggccggggtggttccaggcagtaccaccagggtattgccagtgtgattgaaaagacggcaagcgttggaagagcagagcctgcctttgatcttgcgcgctgaagatcggaggatgatgcgtcccaaaagtcgatccagcgtcgtggtcaagtcatcctcgtcatccctctcgagcgtgatggtcggttcgagcttggacaggtccgctcggatccgttcgagcagcccgagtgtgatatcagtcgctcgacttggctgaccggcggtcgacgtagcaaatgcttctcccaagtcccagatgacaacttctgcccgttcactgttggattcatcgtcccactcattggccgacgagacgagcgtgtccggacgtccgggggcaaaggccacacaggcgatatcgacggtatggccgctcagggtgatccttctcccagaatcgaggtcgtacacgtcgatctcatcaccgacagcgagagccaacttgagctcgtccgaactgaaggcgtgctggatgacgccctcggccgttcggggctggcgagcgaggcgaatatggcggtccctcgacgcccatggcaagctgatcgtttcgaaagggcgggtcgggtctgacaaagggtgaaagtcggtctcgatgtcgtaccgccaaacttgctctagctgcgaagtagagagcgagagacaggcttgcatggcggatggaagattgcccgtgtaaaatcgatctccgattgatggacggcgacatggtgtgtgtggcgggcagttttgaagatggtcctccctcgctgtcttttgtatgcaacagccacgaggtcatgttgcggatggcttctcctcgttcctcgttcccatctttctctgactcggtcgtgtttgtcgagtcaaccgatccgagtaggttaaccaggttgtgtacatgctacttgtagcttgtatacatcatcgatatcacatggccagccgttgaccgaatcccgaatctctagcgcgcaaggggaaatatgattcatgacctctaactaaaagttgcaacgaccataatgcaactcggatatcactctgccacaaccataccacgaccgatcaaacacggtcaaagacttgataaaaacaccggccaatcatgtccgaatccacctctacggaaatgtccaacaagcggaccctggaccaaaccgagatctcgaccgaggacgcacctttggcaaagaaacagcagctcgagcagaccccggccgagtcggcacccatcgaggtagtcatcaaggcgaccgaagctaccgatgacctggaggaagctatgatggctgaagctgaagctggatcttccaagccttcggtcgataagaagggcaaggggaaaaacaacaagaagaaatcgactgggagagagtacaagggaacccatgaccgtggagtgtgggaaagaaggccggatagggaatacgctgacggggaggaaaaagaagctcgactacccaagaaaaaggtggctttgctcttggggttcagcgggtccggctacaacggcatgcaatagtaagccgtgctcgtcgctcttggatcctagccgggacctcgagaccgaaccgtcgaaaccatcttcttcactccatcctattctcagccaattgaccgaggatgccaactcggccaacacgatcgaaatgctcgtcttcaaggctctgggcgagatgggtgcgatctccaaggacaactcgaccgatccgaaaaaggtcgacctctcgagagcggcgaggacggacgctggagtcagcgcggcggggaacgtgtgagtcgggacctcgagtccgacgtacccgaccatgagtctcatatcctcttaccgaacggtatgatgcgtgtttttatggacgagcaggatgtcactcaagatgatcacggaaccccccggatgtgaaactcagaaatcgttcgtcaccaagatcaatgagctcttgccgcaggatatccgggtatgggggttccaacgggcgacaaatgggttcaacgcgaggacgtgagtgatggtgcaggccagacgaatccttttcacatgtactcgggttgacatgaaaaaaacctctgattatacagttcgtgtgatacccgggtgtacgagtatctgttccccagctacatcctactgccccctaccccggattctacgctagataagcacctgaaaagcgtgagggagacggccggtctcgatcccgaacctatgcatgagttctggcagcgcgcgcaggcagagatcaaggacatggtcatcgccccaccggtcgagggcgagaccgaggtcgaaccggacgttcagcgacgacgcaagctgacgagtctgaaacgggattggaggtgtggcgaggaggaactgggaaggtttcgggaggtcgtgaaagagtacctcggcactcagtgagtagattcgtcggtaccagcctcttgatcggggacgacccgttgatggttgcccacctcggtctcgcagcaatttccacaactataccctcttccagccgttcgagtcgggagcggtcaaacggtacatgctctcgatcgacgtggccgagccaaaggtatatggcaacatcgagtggatcagcgtcaagattcacggacagagtttcatgttgcatcagatcgtacgtcttttgcgcggaggtggggcccctcgcttctctatcatcaatataaacccttccctcttccctaccatccactcccgcttcacatccgcccctactccccgtccgtccctactcccaattcaacccatcctttcttggcctcctggacttcttggacctcccgcacgcacggacggacagctacccgatcgctacctcgacgggaccccctggaccggcagatgccgaaggtagtgagtcgagtcgaaattcccgccgtcttgctccaagtcgaatcgagtcgagctgtgtttttggtgtcgggattggagttggagttggtgttggtcttggtatccgggtcaggatacgtcctggtgccggtgctggcggtgctggtcgtgctggtcgtggttgccacgggccttcacatttggcgagatcttgcatcttggatctcgatccagcttcagacgatagggtgatactcaagggcacagagttcggacgtcaccttgggcgtgagctgagtcgggacagacgaagaggttgagagcttgagcaggtcagacaggcggccgagagcgagaacgaaagcgacacagcgagagcgagcgcacgggcggggtttcacggccgactttgatctaaagggaagaagacgctgacatatcgtctgcctctacaacccgcttcgtctctcccggcttggtccaccattcatcatctgaacgacgaccatcgcccctccgcctcatgtcgacgttcgacctcgtccggacatcttgacggtttgtcttcgatgacacaatggccttggtcgtgactcgccgatcatgatctccaactttgctttgaccggatgggatcatcttttccgaccatttctgatctcaactcctcatacctctcatcgactcgacacggcccgcacctccacgttcaactcgacaccggactacccacatgcgcacgacacactcgccagaccgagccgaccctcccacctcgtggcactcggtctggtctttccaggaattcgccaacaaaaagttgaccaccctcggaaaagggtcagtgttggcgtctgtcctgcaggcgtatgcgggagtacagggctgacgatcgggtattgcctgtttgttccgatttgatctctttctgcccccctgtcgccactcattgacacacgtatcgatatggaacttcgccctccttgctctgcgtctcgacggccatggaaacgtgcactcgatgaccgatcatggaaccccctcgtcatcccctcgacacggaacacctgacgaccgcgaaaaccaaccccgtaatacgacagatcgaccgtctacgtcgaagccgacttgaccatgaaggagcaacccgccgaggacggtcagaagaggggtcaagccactccgttcttgttgcaccgtgagtcggcggctcgtctcacacttcgacccggtttcatcgcctctcctacggtgtcagacctgagacgcgtcgacgcatcaaacgattgcgagctgatcatcttgtaacattgtcggccctgctatgcaggtaccatccaggtcatcaacaagctgggcagggccgacggcgagaacgccgagtagagctcgaccgtttcgtcttgacagtttgacgggtcctgagcctgtcgacgaggccgagtggattgcgtgccggtattagagatccaggtgtggaaggttttgccagaggcgagattttgttgtacggatagcgaagggacacgggcacgatgaatacactaatccgactcgagacatgttcgcggtctccgatgaacccttcagccaggctgtcaccggtcatttcatcttcataagcctttgatggcattttactttgctttcctcgtcaaactctcgctttgacggctctactgctcgtgcccttgcctccatccttgagtattctgtaacaattggtagaaaaacttgatggtcgacaagtgacctcggatcgacatgcgctcgttgaccgtgtgagggtttttaaagtcggctacgacgggtgaacgatcggtcgacaaccgggttagcgctcggtcgcagcgagagcaaggtgaacgactcaccgatggcagcgggtgcgaaacggtacaagttctgggtgacgttccagtaggcccgggtatctatcatcatggtggcaggaggtcagatcaattcgaggtctcgctaggctccctccagagcccgacttgcccgtattagcaaacatctgtaaaaccgtcaagtcgaaccaatcagcatgtcgagctcgcgaccaggctcgacgttgtagggacgtaccgccgaaggagcgacgacgacgtcatcgccaaagatcttcttgatggtagcgcccatcaactggaagctctccccgtcgctcggagtgataggagccggttcgagtcccgcagggttctcgtttccaacctcgagcctcatcttgccgctataaggtcccttgtgcttgcggtgtttgcaagccttttgggtctggttaaaggcgacgtactcgaggttgtacttgtgggcgatctgaagcagcgtctcagtgaccttggccttggtctcggctaccgacgaggtgctaggggaagcaagtcgaacagatcagcccgactcgtagcctcgtcagagaaaaagtcgcctcctacgtacaagtcgatacggtaattgacggtcgctaccgggcaccgatcggacgcgacgatcagactgatgctcgacaggacgtattgacggcgactcaccttcagcctcttcaggcagtgcgttgaccttgacaccacccttgatcaggtctactgcctgagtggttcccaggaacgccctctgctgggggtccttgctgagcgtggccgccaactttttccaaagatgcggcgacttgatgctcttgcggagttccttcgggagttcaggcgcgtagtcggccaagcaggtcaagtacttcaagtaaggcgaggccgaggtcaggctcgaagggaaggggtgggactcgagcgtgttgatggcctgggcgagaagaccgactgcgagcaaggatgcgatcaggaaatagtcctcgacggcagctccgcaacccgacccacttccggtgtgttcaggagggaccgaagagtgtccaccggcggttctggcaagatgtctcgttcagcgggacggtcagactgcgattgtgtacaccacactgactcgatagtgacgaccaggttcaagctccctttttcggccatccccaagctcgcaaacgtccttccatacgcttcatcgacgcccccgaacccttcgtccactagaaaggcgatcgagtgtttcccatacttgtcctggatcgcttgagacaaagagtccgcgccctgttatcccgccgaccgagcaaacgcgcacaaagggaaaaggtaaagacagggaggtttcagtacagtaatatagctcgtatgtagacgacattcagggtgggaggacggacccttttaccaccgatctcttcgtcgaacccgaacgagatcaagatcgtacgctccggttcgaacccttcttcgatcaacttgtccagggcggacatgatccccatgagctgcaccgagcggacatagcatagaccatgttcatcagctgactctcctccgattgtattcataagccgatgtcgcactggggggcaccctcacctggttcttgcaatccgctgcacctcgtccccagacccactcgtcgtccacaaatccgtcaaacggcgggtgagtccattgacccaacgtacccgggttgacggggacgacgtcttcgtgcgccatgagcacgatcggttggagcgtctcgttcgtgcccggccaggtgtagaggtgggcgtgcgtgttgataggggtgtgcgtgaggtggtcgtagctgtcaaccagagggagagtcattaaggtcgtctcggttgggagcaagtaccatgactacggattgagagggtcaaggcggggaagggtggactcacactcgaggatactcggcctggaggaactcggcaaacttgaaatgatcgtcccatcgcttatcctccccaatcggacccatgtcatcatatgagacggcctacagaacgtccgagatcgagagtcatttgtcgattcagaaaccatgtgtcaagacgaaaggcatggaaggttcaacggcggtatgagaggcaagtatgggacaagtaggtacgtacggggactcgaacggatcgggaaagccggccgatgaccaaatcggtataattgtcgggtactttctattcggacgaagtattactctcgacgaggatcagtcatcactggcatgcaataacaagacctgagcgagacctacccatccatcgcccttgcctagagcgtcaggctgggaaggacacctcgccctttccaactcggtatgcgaatgcccataatcctcggtagctagcttaagagcgtgacccccgaatccgacgacaaagtagatgaagactccggcgaggacgatcagacgaaaacgtgagtgcgcagggcgttgctgggtttcattcgaggtcgagttctcggtgggaaggatcaagtcggcctcggtggtacccggaaggggtaggtgtttctcgtcggtgtacatgttggcaggtcgggatcaatctcactatctatggtcgatgcagactgctcaattgtagctgctgatatagtgtccaacaggcattgtggaagtcaagtaggcttatatacgatcgggttgacatcatctaccagctacctgacctaatctctgtccgatccgaccaacgtggactcgtcttcggtcaaatccgaaaatccgaaatctcccaaaacacctactgtgaatcgagtcttgttctgatacatcttcttgtcactgccgcatcgccattcatagcccctccagtttgtcatcctaggtgtgagtcgggttgttaaccccaaactccgaatcggcggctctgatagctcgaggactggagtaagaacggttgtgacgggggatcgtatcggatcgttagcgccaaaggtttcagagttgtagagacatatgtggaagatggactcgcagccaattcttcctccatgactgtgttctcgacaagaaattccagcaagatggatgtgcacagacggagaataccgtgagtatcgccatgatggagtgagtcctgcctctcattactcacatccctgagcttgacaggatccacccctagcttctcggcgacgacctttaactcgtcggcattgatcagcgtcaacgcgtgcttgacgacatcagcggtcatggtcagattggtagatcctcccgaggtctcttggtagttggctttttggcggtcgacttcacaggagaagacgcgcccgtaacctcggatttgactttcgggccggtcgcacgcttggtcttcgatgacgatttcgatttcgagggcgacgagaggttgggtttcttttccggggaaggagagctgggaagacaaggtgaggaggtcagggtggcactctctgtggacgaggtagcaaaacaacgcccgcttgagcttttcttcgtcggacctcatttgatcggggtcaaccgatgacttgcctctcatatccggcttcatgtcgaaatcttcatcacaagacatgttgcaaatttgtcttctcgccaaatcacttgaagatactagagtaggctgggacgaggtcttcagacggaggatcttatatactcaaaagtcgtccacgagcacgcttactatacgagcacattcccgtcgctcgacgtctgatgacgagcagggtcagccttattattatagctagtccgagcgagaaacaagatcgtcgaccgtggcaatcgtctcgtcaatcctttaacttctcaagccgatcttcggtggggtccatcttgtaatgtcgatcttcgtcgctggggatgggacaagaagagttctttgtccgacattttcggcgctgaccagaagtgggttaacgtcaggtacattttatgctgcgtatgttgctgctactcatccgagagcatatcaatcaccattccaaaagggcgacgttattcgcctgcaatccgagggtggtaattgtgatcgacataaagtcccatcctggatcgtcccgacatacccttcactggaagacctcacatgtagttcgaagagaatggtacgcacaacgaagagacacctggcgtgtttcaacttcgaacgagcttgattcaatcttgaaaacttcgcacgaccgttcgacaagtcaccctccgtcgcagagcgttgtcaagccggcggttattcctttctcctctactccgtatccgagctgcccttacttccccgacatcgggaagctggtaccgacttcattccgacttcattccgaagtgcatagcatcggcgttggaacgtgacataaataacagcggcgcttggagcgtggactgaacccgctcttgctaagtgctcacatatccgtcagccggtccttcgtggctttccaccaatgcgtggagccgccatctgacgtatgttcggagccgcgactaggcgtctgcatcgccctgcatcagtgatccatgatcactgctcgtcagttcagtaaatgacgacaatcgagctcttgatgcatttcgatccaatcgtttctccacccttgaccagatcggtacaacctttgcatgctattgacaatattcatatgcaccctcgatttcttctccttgtgctaccatctagttccccttgtgcgcacgcaagatctcgttcaacttggtcctttgctgacagtggtcaaagtggaacgatttggccagctcatcaagctcgtccatcgacttgtccttgaaataggaggcgtactcgctacagagctcttcctgcggggagagtcagctagacgaaacgacgtgcgatgtgggacgagcgacagcactcacggaaaggaggatctcacgaacgagtcgcgcgatgaaacgcttctcgtcccaagtcttggggtatcgatccttgaacgacggggcggcttttcgggcccactcggcgatgggtgcaaacaattcgcggacgggagtgtcatcgcaaccccaagcatcgatcgccagttgctgtgcggtacagtaaaattttccagggtcaactcgactcggacgggctgcctggctgacgggtctcgttgctatgcgactcaccttctttttttcgaggaacggcttcattaacttcatgtacggcgtgtcctcatcaacgtagaccatgccctggaagccgatatctttccacaaccagatggaccaagaggatgccgtctcgtcgtataactgcagctgatcctcgaggacccggaatcggacctcattgacctgctcaaagtcgggtccgtccgacttgttggcatagaccggaccaaactcgccgtctatcaaagcaacgatcaactggggctagacggaacggattacgaatctgctcgctcactccagatgggaccgccaatcttcttcatgtactcgatcttgcgctcaaacgaccttcgcaacttggccttttgcgcatcggtgccggtatagacctcgggggcgttgggaaatccaaagctgagggtcccgcccataggtcagcaaaggcgtaggtgtggcacactgggcttgatgctcacctgctgtagtcgtggcaagcgtaaacagagttgggaagtccagggtgatccatgaatgccgtaaagtcggctccgaaagtgctgaaaaggcgaagataccatcagtaatacgccctccacccagtcgcccgctcttgctccttactttccactgaacaagaagaagcgcatgaatggtcctgtcagattttgcattttccctaccactgttcgctacaacatgaactcactccaaaaacaagatgtgcttgtcgtccacctttcgaatagccttttcgatccggtcgtagaaggctaccaccctcgtgtgcttggggtcagtgggctcgttgagcgggttgtatccagccacccaagggttgttcttgtaatgctgcgtgtcacatcggaaggacgcggcgaatgagtcaatagcacgtacgatattggtcagcccaagctgatcggatcagtggagcaggaattaacgacccacctcggccaaattctcccaaatcccgatggtccgatcctggaaatccttgaaatcccagaacaaggccttgtgaacgcctgcaacgtccaaccgagagtaggccatacccaatcagtacctgcccccgggtctatttgatggctggcgcagagcgagtggatcgcactggtacactcacccagatcactatgccagtcagtgttctgagcaccgggacaagcgtgcaagtcgatgaccgtgtagatcccgtgtttcgcgcactatcgaaatgaagacgtcggcatcggcgtcagtaacgagcgactctgggagaggcatctctgcggtatcatccgcatctggtcgaattcctttgtttttcaggaggaggatggaaggggaaggtcgactcacgagctcgatcactcgatccaagtgcttgagaccttctttcttgaagaccctggggttcatgtcatcctcaaagtgtcggtagttgatctgcccgcggcccgcagtcgattcgagatcggggtcgagatcgagatcgagtttggaggacgccaagaatatcattcagaggtcagcattcgtcctcacgatgagcagcctcgaataggaaatatgatcttatggagatcacaccacgtatacttaccggcaaccggatagcgttcaacccgagcgaagcgaacgcctcggcgtctttctccgtaaagaaatactccaggaactgtgagtggtccgtatcaccaataatgcatcaagggtcagctcatacgatcttcctgtactcgatcacctggatatgaatgacaggggcagcagagcggatgaactcgccttgtcgaaaaagtgctcgtatttctctttgccgaggacttcgagcatggcctctcgcatctcgtctacaccgtcacaaagcgagtcgaaaatatggtcagctcgaggtccgacgacgtcgcaaaaagcaggactgacattcgtgtcccgggtaaccggtgatgaactacagtccagtcccacgggatgtacaaacgatcagacgtcgatcagacccgatgcaatcttcagagcgttctattctatagcacccacgttctccatgttcatccacccgcccagaccggctccacggagcaagacgggcgtctcactcgggtcgtcgcatttgacgatcttgtcgccggataccttgaggaagggggtcgagggtgccattgtaatctagttccgacgtgtatgatttgtatatgcgtgacttcacggggaagacaagctatggtgctctttagggaagattcgaaccgggggctaggttatggatgatgctcgcaccatgtcgacatccaaaatgggtttttagccaggtcgacctcggcgttcggcggatttcaacaggttaccaaccgagaaatcgaccgaatgagaaacgcggaaggggagggatccgaccattgttgtcaggaattgaccggtgtaaaagtgtacaccggcgtaatactttggagatcacatgggatcattcggagagctcaagcctgctcgatctgagcatagggtcgccctggacatgcatacaattgctatggacatggacatcgggggggatgaccccatcaccgatcgacctgtattttcgaccgatgttacgcgcgctaaattgtatcatcatccacgtcatctcattcgactttgacgttcttcttcgatttcccacctctgcctctcttccgcacccctcacagcctcacccaagagagcattccaactagaaccccaatcccgctcgaaacactcttgactgaatttcagcaccgcttgttgacgtgccgctcgtcggatctctagttgcgcgcttgaagggagggaaagagctttgtggatctggtcggcgaacccctgcgcgtcgagcgcgtgaaatcctgcgtcggagggatcggccggttcgaatcagctcaataaatcccccaggtctccccacgttgcgttcgattcgacgcaatgacatacctgtgatttgaccgtctagaggaacgatgatatccatgaccggacccgccgaagcgtgagctagggggatcaatccggccgcctgccagtcgcaacgggtcgggtacagccgaaatgtagcgagggcaaatgatatttgtccgacggggattatcgcgagcaaaccatcatccgttatggagcaccgtcgcgaacacaagcaaaccgagagaaacgaaagatcagcatgccgtccctttttcccagtccctttatagcgccttctctcttcgccactctctccgttcccacatcgatctcgacacccgaaatcgcatcccacccagatcgaccccgatgtgtcgacgaccacagaaaaacagacgccgtgcggactgaccatgaactcgaccacgctgatcccgaaatgttcatccttcatggtattcaacccgatcgaagctcctcccagtcgacggacgatctcggggaacgaggcgttgatcacgaattcgacgtgcggctttgatggtcgatcggtcggaattagtgagcgtcgtaagaggtgggatgaacatgcgcttgttcgtcagctcgggtcggttcggacacagggaacgtctcgtggaatgatcgtcggggacgatgctcacctcgattccgagctcccgtgataaccacctcaagccctctatccgaagttcgtccgcctcatccctacaactccccatcaagaccaacttgaccccctttccctgccactcggggtgatccttgaaaagcacacccagcgcgtcgagttgtttcgcttgatccttttccggtcggaattgcgcgagcgagatcagggtgagggattcgtcccggttctcgagaggtaggtgaaggaactcggacgtgtcgcaaggtgggaagacgacccgacttttccctcgccctgatgtcgtcgtcgaagatgtcggtgatgatgcgtcgatattgaggaggtaggccaaccatgtcgatcgaccgagcgtgaggagagaggtgatgtgccctgacgtccaggacgagttggtcatgatctcgtcggcgaacaagagggagacggcgtacgcccgggtcaacgcgtggtaatagctgcaaaggcaccatcatgaaccggactgcatgatcagcctcgaatgtcgacgtagcactgcaccgaggttgactcacatgagcttgaccacccgtctccatcccacgagacccgaaccctcttctccggccttgcccgcgcccccgctctccacgccccataccccctctcggacccgcccgatcatgtccgtggagatgaccgggtaatgcacatacgcccccagagggaccgtccacccggacatgaaagcgatgaaggggagggtaaacggattccccatggtgtctacgcccaccgtgaaacgaacaggtcggtgtgataagcgacagtggtatcacccacggaactcttcttcctcccgaagcgcacgtccgacgagaggaaaactcaccgataaacacgtcgggccagaacccacctgacccgtccgacccgcggaccgagcggaacccgaaagataccccacacccttcggcgcagacgagcatgctccctatgctctgccccaagagggtgaatcgacgccaatatccatccgagatcagtcgacgggatggaaggggcttgaagtgtatatcggccgagtaggtgggggaggagagggggagatggaaccgtgactggtataagaagggtgtgtcagtggaatgacgatcgtagagacttgggaaaacgggtttgtcgactcggagtcacccgtatagactcacatgtactcgttccaagattgattctttactagcctcggggtagtcacccgagtacaccacgcagacgatctttcgacccgggctggaactagcagaggtcgaggtcgaggtcgtgtccccctttgtacggcctgtttgctgctgctgctgctgctgttcttgttgttggcgtaatgcccaatagatcgcggtccagagcacccgctcgccccctccgccagcgttgctgagcaaggcgaaaaggagatagtcgagcgggtgtgagcgacacgagatgtgcgagccggggaaacctggagatttgaatggggaaacccggggggactcaccagtacggatgccagaatcctatgattaacggtcttcctgaagcttgagacggtagggtttccttgagaggagccgtcgtggccgacccgagcttcctccgccgtaaagtctcattgtcatggacggtcccggcagtcccgctcggtttgacctctctccgctcttcgaacccaactgatctcaggaattccaccttgttcttctcattcctcgctctctccctattcagccaacccatgatcagggcgacgaggaagaggacgaggatcggagcgacggagaggacgatgtagtaggtcgggatgtctatcatggccgacgcctgtgggacgggcttttggcgttcacgagcgctggccagtccttgccgcaagggcggcggtggacggtaagtcatagtgcctagcctcgtatggtagagcaacggccgcttgtatgagttcggggtgagtaccagtgttgctaatagacgtcgttagattacgattgagatgcatgcatggcatgggggccgaggtcgaggtcgaagtgatctctcgcgtgttgtttccaccttgaacaggttcacgctctcgtctaaacacaagtgttacggatatgaaacactcgtcagatgtcaccatcacatagcaaccagctggaagcacatgatggaaagtatctacctagatagtcgttcgtaacaggcaatttaggtaagctttattctgagatccatcggttcggggtcgattcaatacgttgcaagattgagagcgtctccctgtatcgggacgagagggtcattcgaggtcgcctcgagggaaaagacgcatgttctctccgctctatactcccccagtaatgaaaaggtccgtcctgtaggcgacggccttccggcgggcgccagctccagttgtcggtcctggcgggcctaccagtaccagtacccgcagcagcgttcgtcgggttcgaggagggtcgagattcacttggtgcccgtaatgaccagccgaacgatgtttcgggggattgaccgctggttttagcagccgacttggatgtgacattatttgatggatcggctgcccaacagtgcggtcatttaacaatagttttgtctacaaagcccactcgtacaggcagtttgatagcacagtcgtaaggaattacaagaaacttctatcgtaggcgtcgacgagcgacgaaattcaagtcgtggaagagcatcgttttcttttattatcgctagctgcgctttcctagtcgttgccgaggcctagcgagagcatgcgggcagaggcaacctgaacctcaggccagagcgccgagtaccgacttcgacccgatcgtccaccgatcaagcgttctaccgtccatagccgtgacatgttggcaccgtcccgaccacaacccccaagggcgactcgcggatacacaccacgtttcacccgatctgagagaccctggccacctcgacaccgacgacccatcgtttcctcctctgcccctgtccagtcacaggacccatccccctccccccgctcttgagcactcggtcgaaaatctcatcccccgagctgaatcctgcgccctgcgcgagcggaccgtccatcatccccgattccccgcttgataacggcatggaggacgtccctggatgagaaaccccaggggtctctcctggataagagccggataaggacgatcgagaggtgtgataattgacgggggcgagttcgagcgggacggtatgcctcgtcgtcatggtcgtcgacatggcagcgacggaccccgagcccgacttgtctcgatcgggatcccggcgtttaatttcggggagaaggttcagagtcgacgaggatgcggtggattgcacggaagaggtcaagtactccaacgtcttgttcgtcaactgcgtatgcgtctgaacgaactcgaccggggattgtcgctgtgaccaccaccatcaacatcgccgcgattagcctttgcatccccggagacgagagaaacggaacacaacgcacctcgtatgtctttctccatcgatgtcggggcggcaatttcggtacccaaggtacgtccgccatgtacgtcggcttgacgttatcacggaccttgatctccctgacgctatccctgctattccctccctttgccacgtctcccgatcccggaatcgacgtcgaggtcgagctcgggttgtcgtccttgttctgagaaagaggacgcggcgtagatagttgctgggacaaggcgtcgagtcgatggatggtcgacgtccttcgtcgtttagtaggtaacggtgtcgagggggtcccatcggtgttgacgaacggcatgatgggcagaaagtgggagtgagaaggtccggcgatggcgggtggggattcgtcgtcggacaacgagatggtataagggtccaagggtggtggcgaagcttctctgatgcataggggaagcgggactgcataggtcgacgatgcgatgtggtcagctcgagcggggaggttgagtcgtgcgccttgaaactcacccagaacccgatcgggttctttacccgcaagacgtctggatctcgccatgaaccgtttgtattccctgactggcgcttcataactctcgaggacgacctcgtgcaccttcttctccttggcatccctagccgcccattgagcgcgttgttccctctgttcacgttgatccgtcgactcgtaacccgacacttcggcttccggagatggcggggtctgcatatcaaacagatgaggatctactcgggacaagtaagagttggagaggcattcgagaatgtcgacgggagcggggttgcggcgattggcgtgctcggcgagaagatgggcgtgttcgaacatgttggtgatgtctgacaggtcgttcgatcacatcaaccacggcgatagacgcggtatacctgggagtagacttacgatcctctagcattctttcgagttcgaccagtaccccggcttgacatccggtgaatcctcgttgttcgagcaccgagccgaccatgtgaaccaggtggaaggaagccgtggtcttggggacatgtggggtctggcgaggtgcggacacctcgaacgggttctcttcctgcttgaccgtcgtcatacttgtacctggcttgactgaagcttgtgataagtcggcttaatcgaggactggagaagcaagtaggtcatcccatcatcatctataccccagttccagttcgattccgtgttcaacttgtcaatttgcttccgaacaactttgagagagaagtcaagttggagagtcatgttcgactcgatgttatcatccatagatcatctgattcatcgtctgagcgacccaatcgacatctgtagctgcttagcatcgtccccgatcatcaaaacaaattcagtcgcccgctgagcgaccttgaattcgctcatcctggcgttcaaaccagtcttccgtaggatactctcccccgatttcaaaagacgccttcaggagatgacagccgccgtagcagcgactgctagcaccggcagtgcaggaaatgggaaaaagttgcatgggtacgagttttacgagagtataggaagacccaaatttgtgatcgctccgatggtcgatcagagcgagctggtgagtctcctctctacccgaagcatgttgctaggatatcggtcctgaaatctgttccttcttcctctctgcatcttttctaggcatggagaattctctctcgtcaaccgattccaccgtcgtaccggccggacctccaaagacaagccgtcgcctcgagctcgaccacccctaccgtacccgtacccgaaaccacaacttccacccccacagtcaagccggaacaggcgacagcaacgacgacggcgaccacgagctctaccccgctcatcgacgggaaacaccctatcggaggcgcacacctcgtctacacgcccatgatccatgcgaggctcttggtagagcgggaagtcatccaggggaagagggatgaagaggcttttaatagggtgttcggtcagtaccctcttcggacaatttctcctatatggacagagaaggctgatcgtcagcgtttgttcaatgttcctctgggttcgattcgatgtggggggcatggtcgatggggatcgtggtcatgcgcacaggtgaagaaggatcgctcgagaacctcgtcgggctggatgtaggcgatcgaccgttattcgtccaggtgagtaagcgagccgagtcgagcaacgtcgcttttcgtcccgtcaagacaatagggagagaagcgctgattccatgaacgttgttttgggtggagggtatagtttgcggccaacgatccggacgtcttgctccaggcagctaggcaggtggagaaacattgcgatgcggtagatatcaatttgtgagttcacctcgtctcgacccacaggtctgaagtcctgcgggaaatagaacaaaagctcatcccggacgacatgcgttcagtggttgtccacaagggatcgcgaaacgagggaactacgggtcgttcttgcaggacgactgggacaccatttacagtatgagtaagttcaccgctcattgccttggcccgatttgtcattccataccaccttgaatgagactgatctttcgccacattggtagtcaacaccctccatgaaaacctctcgatccccgtcacggccaagtttcgaatctttagggacgtcaacaagacgatcgagtatgccaagatgatggaaagagccggggcgagtatcttgacctgtcatgggaggaccagggagatgaaggggcagatgaccgtgagtgattgaggatatcttcttttttcttttctttttgtcgcccgaaatcactcgaattatcaagggttgctgatgatttaacgtcaacttcggtaccttcagggattggcggattggcagcagataaaggcggtcaagcaggccgtcaaagtgcccgtctttgccaacggtaacatcttgtacagggaggatgtagatcgctgtttagagctgacgggggtcgacggcgtaatgaccgcagaggtgagccaggcttttcgaaggaattcgcgcgtgaatccggctgacgtgcatgcctgatctggatcgcgtcaggggaacctatcgaacccttgcttgttcgtgccagaaacttcgccactatcacatcctccgtcatgggtcattgcgagccactacttggacattgttgaaaagctcaagacgccgacttccatgtctgccatccgggcgcacatgttcaggctgctccgagccgggatcgaaaagcatacggacgtcagagcgcgactagcttcagggtcgggcaacctggcgttttaccgtagcatcatcgaggaactacagcccttgttggaaaaggacatggaagaggagccaattgaatcattccccctgccgtcacaccccgagaccggactaaaacggataccagtatgggctgcacagccgtatgtgagacctttaccggtagggacgtacaaggcgatcaaagatgcgaattcgaggtcagccgatgggacgaccacgccgggagtgcttgaggatatgatcaccggcgggaccggcgaggagagagtcatcgggcaaggcaagtctgatgtcgccgttgaccacatcgatatcgctcaacccgcttacatccgatcatcaaattcgcacagacggtaccacggcgggactcgctcagcccctgatgccagaagcgcaaaagtgcgagagcggtgttgaagacgattgtcgaaacattgcagccgccaattgtcctcgaatagggtgcctaacgcactgccgcgccaagggaggtctcgaagcgggtcgtgcggaaaacatggcagacgccatcaagctcgctcagggtggcaagctcacggggctcggttgcgacgcacacgaggaaaaggacagggcgagaaaacaacgcaaggccgagcagaaaaaggcctaccaggagcacaaggagatgcgacggagtaagcggaatcgagccaagagcgtcgagggggacgaaggacgaggtgtgaaaaagaccaaggtggacgaagccaagccggaagaggaggatgccaatgatgtgtaatagtcgtatggcaccgacctaataacacgttaatattgccctcgttcccatgctaacctgtcgtcggtgctctgcataatcacacccagacacgtcctggatcggtgaccttacagaaagtaacactggatcgatcatcatgtcatcctcgtatgatgatctttgcacatgcgattggcatagtatataccaaagctgagggagagacgattgatctgggccccctaaatccagcagactgcacaattcggtccaccgacacacttcaagaaacagcggttctgtgagcattgccatgtgccggtttcgttcccgagcgagagtcaaatggattggcatccgattagctgttcatagcgagtcatcagtgatcaaggagatgtgcccgaatgatgccaagcactgttgtgggtcatctcccctacgaaccgcatgatcgattttctctctcaaaaagaaggtacgatttgtcgctctgatcgttaagatccgttcacctatcgacactgcatgagttcaatttcatcaagggtctgtttgaactatgtttaagatactgatttaatctatagaccagcgctcttattttacctacatcgtttagaagcgagtgtttgcatagtttgcacccacagatgacgaggctttggattttccaagatgtttatatcctccatttctggcttccaggatttcgatggaagaatagaaattctcgactggtcagccacggaacgaccgtgatatgcccgacgagagttcaatggtaatgacgtcgagcttgatcggcactgtatctatttttgtgtttttcttttcttttctatttgcgttcacaccgcactcaaacgcacttcggcctagattgtttctaccaagcatcactctggacaaattttctgcaagcctccaccaattgtttggcgagggcggacgggaacggacgattgttcgtttccgaattgtcaatagcatgaccccactcatcgactttagcggcgttgatcacatcatcttcgtgaagggaagagatgatgatccgcgcttgcttggcttgtcccctgttatctccgtctttctgtgctttctgaaaagcggttacggcctccatgaactcatcataatccacgttctgtttgtattgagccgtttgactaggggcttcgctgctagagggcatgttttggctggaggcgtgagagctcatgacgatcttgaagaaacgcagtggagttgctgtttatacgttctgtcgattgactcaaataccctacgaaccggatagaaagggcgtagcataagttttgtttatatacatgtctgggctgagttcgccatatatcgtttgggattgcccacctttcacttcctttcacaggctttagtgcggtctaactgagtagggagatgtcatgtgaggggacttctaatcctgcttcttcatctcgctctttcaattgtaacgtcgtaatatgagatcagcaggctactttccttttatgccatgtgcccaccaattgcatctcgtaacccctaaggtatatgcctcacgtttcatgtggttgagatgaaactcctcttatttcatgtgctcgccatccggctcgatcggcggatttgaccgaaagtgcgagaaggtcgagcgatcgacagaggaacatatccggcatgatcatgtcgacctcatagaacttgatgccatgtctcctgatcaccgacccaggttctagaagtccgacacatcatctagacaagacctatagacatgtacaactcgaaagacactcctgttcccgcttcgctggcgtcgccgcacgcgttgacgtcgtaccacagcttccacgacgacctgcccccttccaacgtccccgaggggtacaaccgattccacccgtccctacgacccgagacttttcccgataccaagatcgtcgggcttttggcttgtcaacgagatccttacttgagagccttgaacggcgtggagatcgtcgcagctagaaaggctgtacaggaaaaggccaaggattcgcgcaagaagaaacccaagggtgatgtcaaggaggaaaaggcggagcaactgcccgaaggagagatatgggaggtcgaattgaaggataccgtcctgttcccggagggtaggtattgacgtctcgacgttaccagatggatcgatactgatcgtgtaatgcaggcggcggacagcctaacgataccggtgtcttcaccatctcatctgaagccggcgaccccgtcgacttgaaggtcatcaacgttcagcgaaaaggtctatctgccgtgcatcatgtgctcgtcagcaaaggcttgcttgaccgaatcgagagcatcttgaagcccggcgtcaaggtggatatgcaggtcgactgggaacgacgttgggaccacgtaagccacctctcatcccgtatgcaagaagtctggcgatcttcccgctaagtaaacacttcaacgacgatacagatgacccaacataccgctcaacacctcctctccgccatcctcgacaaccattacgcccttcctaccctctcctgggcgctcccagcccacccctcggtcgaaccgtgctacgtcgaactcccccgtgggctctctcaggaagagatcgacgacgtcgagaaaaagtgcaacgagctcgtcacccgtcaatggggagcgaaacctggcgttccgcagaccgagggagagggggatacgagggtctggatcgagagtcggttgcaagggtcttcgagcaccgcacagagtgggagcgtcacccccgccacgaacgggaatgggaatgggaatggggatggggcgggggatgtgcaaaaagagatgcaaggattgggattgggggaacaggtcgccgagtacggggatcgggagagtagagggatgcccaaggactacgaaggcgtgagttcgagctggaactgcgttttgtttgggacgacgactgacttgtcgctgcctctacagggagtaattcgaacggcagtgattgatggagtcgatcgaagtcgtgagtcccgagcttctcgaggcatgcaaccgatcgaagcgtcgagctaccgttgacttcgtttgccgttcatcctggtagtctgctgcggtacccagtgagtaatgctagcacagctgaagggagagtttccgttgactgatcgctcgacatagtcaaccgtacctatccaagatccagttcatgcacgtcctaccgactacttcgacaaagccgtctccaaaggcgacccgtctgtacatggtcgccggtgccagagctcatcgacacctcttgcagacgtctcggcagttgactacgaccagtatgcctcttggttgttcgaggagtgaggtggcgatgcgggtggcccagcgagaagatcagcggaaggaagccacccgactcgacggtcggctgagagaggccctggctagggccgagggcagggcaatcgagtggaagcaagacagccaaggtgtctggagggccagggttgagcggaacgaggagagcacgcacgatttcgagttcctccagtcgctcgccaatcacgctcaggatcacctcatcaatgacatggtgaaatcgactacgccatcgccttcttttgtcctcgtcgccatttccaacccagaccctctttggcttaacaagacgcatcagcctggaggcgcgttcttgcagatcacatcatcaccacctgatctcgccaaacaggcaggtgaccaggtcaaatcggcactggacaccctgggcgataagggacgagtgaaaggaggcggcgccaagggcaagttcatgggcaaggtggcgggtggctggtcggctcgtgatgatgatgccatcaaaggggtgcttggcgaatgatgaagagaatatatgaatagttggcttgcttctccagatgatgtgcggtcgcggcgaggggagacactgccgatcacgtctgccgcttcccttgaactcgtcacgattactttatcagctatagcgaataaggcaagcgtgtgtgtgtatgcccgcaatatagatatataagagcacacgatgctctgttatctgcttctgggttggggctaccattccgattattgcccacgaattgtattgcttaacctcgccctctcaaactagtaacgttctctgcgtgcaatggatccctcgaccttgttggattatggtcccaaagacccattccaatctccgtccgaacagcagactgcagggtcccagaccgcaacagctcagccagtatacgaccctgacaatcttgcatacaacatcttgagcgccagtacagacagctggcaacaagatagagcagcgttcacggaactacagtcggtcttcaaggaagccgttgaagctatgaaacaagaggatgatccccggagccacaacgctgccgtattgctcgctcggtacgaggatcaactagccatctatgacgacaggaacagcactctactggaggattccagcctgtgtaagatgggttggaaggcagcctgcgacgatggaaacgaactagcaagcctgatttttggcgtggcggactcgaatcctacaagagattcaacctacggttctccaagctccgagcgccctcaaaccgagatgtccggaagctacgttgactcccggcgtaggactgtcgcccaaggggagcaagacattggttcgcctgtcttgtttgggttggcaatcaacgatcctcgtccccctgagagaatatccaggacgcttctgaacaagatccaagagctggataaccggaaggaagcacattacgaattggactgggcgcctcatggcattgaaaaggtcatcaagagcatcaacgtcagaacggcggaggtcgggaagttcactacaagatctcaaatgacgttcttattctgcgtagtatttggtgcggatgcctatggcttgatttgtgaatctcacattcagcgcgacctggctaaagacgtcaacagacacaaaagcgcggtcaagagttccaaatgcatcaacaacatggcacaccaccttcagttcagtcgtgggtattggtgcatatgcgataatcctaagcatataggattcccagataaaccccctgagcaaacacggccgtgggagaactggcagatcgagatggtactagagtctctactggaacttgaggaactgctgaaggagctatggagttccaacctttagagggatccgtcgtgattgtagttgggcagattgtaaattagttccatgttactcgaaagaactgttgggaatgtgcgtctactctattttaggggaaaccaataccagttgccggaagattgctccctgctgtttcgtcttggtccagatagctcggctgtcagacgcatcttcactgtgagcccgccaatacactagctgatctatcggccccaccttcgtaaacgggcttctggtccctgatacgacgttcgcgatcatcaatattgtacgatgctcttgccccaccccatcttgtaaagaaaaccttacgaagtggctgagggttcttgcaagcacatagggatgtcgcgtgtccacgcgcggcggcttcgccccccgagccttgtcctacttgatctcctttgttcgtgcgtcactccaatcgcaggctctgctcacagggcagtacagtctgattggtaccttgtaaatcatggacgcatccaacaatgatcaggctatatatctacgcatacttgcatgttgtatacagcgaaccggacacccgtgtcgtctcgcccataaggcatttattctcatcaaccgattgagcatcccacagtcgtcatccagtcatcaccgttcgcaactactacacctacaactacttcacctgtgcaggatggacgtaacaacatctgattcgatcaccttcccctccatcaagagtttcctcagcacaacctgtcttcgcccggacttcacggctacaaccgtcgaagacttggtagcaaacgaggtgcgacccgccttcgatacttggtttgcagccaggcaagcttggcgcgaagcacaaatggctcttcagggggagaaatacagtgaagaagcgcgaagagacgaggaaaaggcttggatagaggaaaagaccgcttccattgcttgcagcgatcagattgttcgacacatgggaaatctagccgtctccaatgatagctcaatccttgaatcggctgaatggtcagagatacagaccgatctgcatgacgcccaaacagtcttgaagagatacaagcgagcgccgaaacttgagttgaccgagctattagcgatctacaatgccacacaatcactccaagataaattgggttcgatctatccgggttccagcgtcgaatctaggaatacggttccgacaacgtcaagcatagctgataatcgagaatccgggccggagatcgcaggtgtactgtcagtatttagtgacatcctcatagatcccgggagaccggaggacttacctatactcgtacagaattggctcgatagaaccctgaagctggcggctgaactagcagtgcatttggttcaaaacatcgacgcattccagcaactcacgagttctcaaagagtcgtactcatggacgctgcttatagccttgttacatactataagctaacgctgaaagctcacctagaagctgatctatccacgaaccgttctgctcaagaagaaaaaataaagacggcggaatgcatcatggagatggtcaacacagtaaaagcgggtaagcgatacaggtgtatctgtggggacacatcgcacggcgacatcgcacgcatcaagtctggctcggatatcctggaagcggtcgtcgagcaagtatacgatagcatagtgacgtataaagctgaggtttccgggatctacgctcaatttgtgaaagtcgtatgagaatagtcttagtctatctttcgagtccgtctgatcccaagtgagagccctgttcagcaccgattatacccactgcgaaagattcgaagctgatggacgcaaattccgcaggccgcttttgagtcctaccgaataagactgagcatgacaagttttagacttaaattgccgtgtatagcgtttatatcggggattcataatccggcatggtttggtagagaactctgtcgcgctgtgtcagttatcggggtgatatctcggtaggcacttcgtcgtgagtaagctacgcccagtctgcgagctacatagcctgttctaggtctgcccaccatcaacaaaggcgagatctcgacaggccgagtgtagaggatctgagtctagatgtcgcaacgtcttctgctcggtcgttgctgcgaaaagcctcattctcgctatacctttcgccacttttgttggtctgtgaaaccattcgctgcaagcatgctgggtaacgcactttgagaggtctgcacaattagatcaaatccggtatcttgcccgccccagagctctacttgagcagccagagatatcgctgcaccgtgtcgacgccaacggaactttttcggtgatagagatttggtgagaaatcgtgcgagagtcctgcgggcgaacagagtatttggctgaggctacacaatgataatagcgtttgttgcgacgcctcgcgcgagatgatcacatgacgcgacttgaaacgcgcgagatgacgtgctataagctgtccctcctttcaccttcccagataccgtcataccagtgtcatcgtgccgtacgtacataagcacaggatcgggctaatcacgatgtgtccatccatagcattatgacaacacgagaccagtcatctcatatccttactcgacacgacacatgcgacctaggaaggactacaacgttgacatgcagtctcatctcatagcatccgcgagcagtgcacatacggcatctgatggaactgcgagatcgctatcccgagactccacttttgaggaagatgcgtgggcggagattcagcggcgattggctcccgcgttcactgcgaatagctttgaaccagactctgctgagtctattttgccaaactatcgtactgacaggccgatagagatggaagatcgaaacactacctccgacgcgagtatctggaagatcccggctaccgagactcccccgatgagctttgcagtctctgtcctcactgcgggaaccatcccatcatcttgttgcggatatgattgggcaccagtcccacagggattcggtccaaggaagtcgttcaggtcaaaccttgctcaactggcagcgcacgaggtagccgaaacggaccctatctggccccagcaaccgctaccagaagtatgccaaaatgcttttttcgacttgaagggaaaatcagctgctttgaaactttgggaccagcgacttcatcaagcctactcggaagaaggcagaggtcagagatgtccggtcaccaaggacgtctcagaattctacctaagttttgtgagactgtggctttccgccttgcagtttcatcaggcccgaaccgtgaacaggacacacgtcaagatgagttgtaggcttgacgctgcatgctcttgcacgatggtcaagacacaaaggctttcgaaacctgaattatatgagtctaggccatatacctgtaaatgtgcactcaaatcatcacaccagggtccgtggtctacagaagacagctcgaccactgctctacagatacactatctcgtcgcgcgactgaagacggcatgcgcaaagaccgtcagtgagtcttcgtggcggccttactgtcttcaagcggcagaatgaaggtacgcggcaactgcccttttcaaatctcccaagtgacagacattggatctctcttatagccatatcgctgcataaaaggcgcgttgtaccgtctgatcttgcccctcggtgttacggtcggcagagtgtgcagccgtacagcatgacgttagtagaccccgtgacattctatgatcgatcactctctaagttctcgagtacactatcgataactgtactgtcttttccatcttgagtcccgtgggatcggataaccggacatcaggggatcgtatatcgcatgtagcctacaacaatgtgcttcagcatctcatgtggacgaaattacatactattgtatcgaccgcgattcaggaccgggcggaggggaaggccgaacctctccactataatatcgtcgttcacgataatcgagacttgttcgagctttacagtggtatgttgtttcgacttgaaaagtcattccaaaggccagatccaaaacgtaagcttctacacaaaccccgtctgcactcgcgagagagagtgaaaggccttcaagccgtgtctgagaggtctaagatcatcattgtgcttctggcatattggatccaacggacgatcgactgtagtatccgctcgaacctacagtgtctcagaggaatttacgagatgctcaagcgcctccagaagggcagtagacaggctttccaagatactagttcgaatcactagcgggagagatcggtaaatgttacacgatcaactcaggcttttcctatatcaagttctccatagaaactaccgcttgcgcctcgagttttcttgtctattcggctcaaccggctgagccattgatcgtgcgcttaatcttggcaaatccaacctgcgacacctgctggcgaggaatgacgctgagtttatcgcgggttttgactattcccgccttgaagtcatcacatggtcggtttgattagtatgagtgctcatattacaggagtcatgcgccatcccgtggggatgaccatggttgtcgatggaaagcgcccttggcgtattagacgcgcaacgttcaatagcagtctttcagaatcaccctgaggcatgactttgaatacctccagcgtgatcgtgaacgcgcgtaatatggcaggctagggtcggtacctggtggacgggccagctgaaagccatggcacgattgtgaccggccaacgtgattttgagactgaacacagccaccacgcgtgcttcagtcggatcaatcattgctttccaatcgcctttattcgtgtgcgctttcctttgtgcccggatcacgtcaggaaggtgtgatgagcgtcttcagcatacaattcccgctctcacaacggatatataacaccggacgagggggccgacgttgtaccgcgctaggaagatcgggcccttgatcactttccctccatccatcgtaaccttatcatcacgcccgtgtcagaaccttgctcatgtttgcgaaacctgacagcttttccgtctactcagatgactcagaagagggtggagtcccactcgatctcaccaactatgatacatctacgaaaaatccaaccccagtaaccccagtagtctccggcgagtttgtgtctccaaatgagtctgcgaattcaggatcacgaaggtgagattgctccgaggcttctagattgaagcttgcctgccttaatctgacacggtttgacgcaagttccttcatcccaccggaaccttcgatcgagtcaggaataccgagccaaaatcaaatctacccttcccatactggcacgccggcaagccaatgtgatggtaccatgcgcggaagtcatcttggccggaatgaacctctagacagtttgtcggcgattctcgacagtacgatggattggcccacaggataccttcagtggctcacagacctactatctacaccgctcacaacacccacagtaacttttgcatttgaccgatggaaacagtctcgtggctttgtgcgggagtgcagacacaacccatcgctaggtatgcaagaaaagctcaaacgcctcacgacagaagcccgttcgcgtctcaacctctacacgactatactcgtactttcattgggaaaccccttagtagtaccgtcgaggtcgttcaaggagatgataagcgagctgaagaagggtggcttatgttcagtacgccgtttagagttcttagagaggctttcgaccggaacgatcagctcgcaaggtgcgcgtacgggctacaactgcgattgtaacatgggtcaccagaacatcggagagctttctgacgagattcatctgcctgcggagatccgtcttacggtcgttgatttcgaatacgaaaccagaaaactgggcgaaaggaattcccatacaagcgcaagcatgactgttggagaaccaggagaggatcgagctgggacgacgtaagtgcgagactcaccgggtgaggcagccgcgagatttcactgacggcgggtaatagatcactgttcgaaactatgtcgctccagtaagtcgtgtctccagtatcaactagaccctcgctgaacaagacgccatgttacgcattgacagatctttcgctgcatccggtttctcggctcctggatatacagtggacccaactcgattcggggattttcaaagctttcaaaggatgcccccggctacagcaacgcaccctgctgggagtgcaggatcgctcgggaaccctcatctctcctatcctcccttcccaggggacgcatcatcttggtaagttgctctcaccgatattatcgagctcaagatctgctcatcaactctgcaagctttcgtcgtcatgatcggtttcttggatattgggtagatcactctggtatagcttgcataaagacgatattacaatgcaatctaccgatagagaacctgaatatgttgagtatatatgtttgttgagaacaataagaaacagagaacaatagcaagtgtgatgaacggttgattgttcttgatgaaacaccggggaacaaagagcgctgttacgggaagcgacgcgcatccggctggcgcacttacggcttcggctcgcgcgttctcgtaacctgttctcgtcaccttctctgctatcgttaccactaccatcgacacaacgcatattcaatatcaccaccttcagggaacaatagcaatatcgacggatattcaacaatgaccttatatcttgacaaccgactacgtcgaacaaagacatctcgactcagcaaacgacgtttcttctttgttagatgttcgaatctcaaccctcaattcggttctctttgttccgaattcgcttcaccgttcttataccgcctattgttctcaacccgccgcgactactctcagttttgtatatatacttagtagaacttgatcgaatccggcagacgacgttcttgtactaggaaggtcaagttccaagatcgcattctattcacgcctactaatttgcaacatcaccgcatcttcaagacgtattgtgaagaggtaacaatcaaggacattcgctaagtagtagacgtctcaccgttcgtactgaacaagcattcgatcctagctgtctctagcgatattacttccttatccgtacatcaacccggattcgtaccattccaaccgaattcgctcccagtagccaaaatcggcttcactcctgttgtgactacctacgatccgtaccgacatcacacttagatattcattagacgcgaattagcgaagctccgccgtaacaagcgcaagatcgatgtccacggaggacaaagaggtaagagcggacaataggatttcaacacggttcccgcaggagcgccaaacttactggatatccatcgcaacaagattttcatggtcacaaccagggtcaacgattggttacaaaggcacttccagttccacccggacgcccgaaagaggagatctggacggctatcagagggatagtgtcgcgcacaatgaaagcagcgtcagcaggggtcccgcagttggaagagttggcggctacccacccagaatctttcttccctcagatcgagcgagtctcacttattattagtgcgccatcagcttggcgtctaccgagctcgacgctcggtgtaacgtcagctcgccagaaagcctgatccgccagaccgcttgtccatgcacgagatagcgggctcgcagaagacctcacgcaatcacgaggtagtgaaactcttcacgaacaagacccaggtcagggtcgcaagcttgttacggattggtatgatccccaactgcgcttctgcggcatgtctaaatgagctcatagtggcaaacgtcgagcgcttctgtacgctgaaagtgacagaccgaagcaccttcccaagacaagcgccaacacactcagtgagcttaccatggctgcttttttggtcgagcacagacgcactgctgtccttcttccagccgaggcacgcaacatttttggagttgactcagtttaaacaagtcggagaaagacatgggtcaacgccagcggtgtcgaaatgctgaaacacctgtcaatggaaatctatagagctcgtaccgaactgtgattgttgttgttcgcatcaagtccgggctcatggattcatgtagcgatctgctatgagtggtctgccatcccttctgataagccgttgtcgtggaaaggagatgcatgtacggctagagtgtgcgagatgagtgtcttttttgttcctcgtcatccgacggatagcgaaaggggcattcgacaattgcctgatgactggccacagtttcctcaaagtcctttgtcgtgatgtcagtgtcgttgtcttcagctgtcaccgtcttaagccttgttgtcgcagtggtgttctcctcgtgagagatccataaagatcaatcttaaaattttcaagtgtccgatgcatgacgtgtaccctcattcgcactgctcaatcctccctggtgaacacatcgattccagaatttacgcccaagcaagcagcggtatcgttgtcgacttcgttcactactgcgatcttgagatcaacaactatttgaagcagcaagcggctttggagcggtaatgagatcaggctgagcaagcggactggtatatcggtcagtagcaatctgcgagtacccaacgtcttttctcgtgctgttcgaggcgctattttgtatcccactttggggtctcaaagatgcacctgaaaacgaaacatagatatgcggtatgccgccatttcaactggggttagggggggggggggggggggaggagaaatgctggaaggatcgtgtaaggttcggtgctatggggactcgaagcacgagtcctattcagacaatcgctcaaatccttcacaatgctgtggggacagcttgtgctagagatcctgtattgtcccagtcgaaacacagtgacctcttcttcatagcgggtatatgcccaggagagtgactgatctgcgaacaagtcattcgtggacttgcataatccgaattctatttcgtgtcgcgtgcctcgttaaatattgtggaacaatcgtgctccgcacatatcgaaacatatagtctccaatgtacgaggcgaatttcgttactgttgtttcgttactttgatagacggcatctgaagacgtcatcccatcgatttcaccgactcgggccagtagtattcaggtcgacgtccttgttcccattgtccccccccttcaagccgtcctagaccttgatccccctgacccgctcggcacgctcaaccgctcgctcgaggtcggtcatcgtctggtgcaagttgaggaaaatctgggacgagtccttgatctgcgaatcgtcgggtaagcgtaaagggtcagaaagatgtgaccgagatccggaagggagactcacgaagttgtcccatctacccaatacctcgcccaccctccgtagattctcgccccggcccctgctgacacctccggcttccccctgaccggcgtccatcatcgtcggcgtcgtcgatgtggtcgtggtcgctgaactgacattcacaactgaggaagtccccagatccaccggattcgacccgtcatccatatgcctaccggccaatcgaccgtaaagcgctgtctcgaccgcgttcaaccgacttgtcacatcataattcctccctcccgcttggcccggtcgttcctcgttcccgataccctgattctcggaacccttgactccatctccatctccggacccagtgctaaagtaagcgctcaacccgcccgacccgtccaccccccgctcgaccaaccccctgatcgcctcgatctgggaaggaaggccgagcaggtcttcccgggcggagaggaccagggggagtgagatcttggtaggatgggcttgagaggtcttggtcggtatggtacgggggatgggggttgacgtcccctaacccctaacccctaaccgtttgtaaccaatacaagcactaatgattcgttcacaagatagcttcgttcagatgttctctgcatacagaagccataatgcagccgccactgaaatgcttcgtgccgctcgtaagcgggtcgtgctagagataatctggtcagtggggtctatcagtacgattcatcgtccaatatcggaaacctggtacctgccaatcggcagcgatcgacacatctaccactctacgccgactcacgtttctacgggcttggagcacgatgaactacggcaggcctgtccttgatagctgtatgaaggtcatgaagggccaagaggatttgccagagcaccttgttgatggtgttctcggacatcgcagtattgtgagcagtgatagacaacggaaccatcatgcgagaagtggtggtctgcttgatttcaagtgggatcggctacagcgttccatcttgagagcgacgaaggaaaggagcgtaagaggtacttgcctatacacatgatgccatctgatcctgtccctcagactgcccttcgagcaaaactgaactaaaagaccccaggacgaccgcatcatctgttccatgtgagcgactatgtggggatgcctcaagatagctaatatcctgacttcttgcctgactctagccgcagtctcggcggtatcatccggcttaggccgcgctgaagcgctacgtcaagcgacgctatgaccaggggaagcgattatgcggttttgtctcgctacgcctctgctccacgtacagcggtttttgactgtgtatacctcctacagttatcgaatcccacgaccgccccccatcgaagactggtggacaaatacgtatagcggacgcaacccgtacggaggtcatgagtaatgagaatggcattttacatactgcttttgggaccgagcaggtgtgagtcgatacatgggcacagataggactccagtgctacatagcaagtttagactacacgtggagaccgcgaaggatacaagaatcgaacatatgcgagtgtctcttcgaacaaaggaacaagatctaattggaggtgagcagtaagtatcttacgtgcaacagccctataaacttgattcggcagtgaaatatcatccgggccatcttcgactttgaggcaggaaactgcccatgtctcgacggccatgcgaaccactaaatccagggagaagtggctctcaaatcgctgtacaggtcatctggtcattgaacattcagtaccagtctaagcgcaactatcacgcgaagctgaggccactgggtcattcgcgttttcacgtctcgtcctacctcgtgcctgtctgagacgaagatgataccgttactaggggtggctcaactcacatattgaccagactccacctgttctgctatcttgcctgtactgtactttgtcacttcgactcaatttcctaggcggccattcgactttaccagttgctccagatgaaatcaccttctgccagattcaccgagtcacgaagatccaaaccgacttgaacatgagctgcgttatggccaagatcaccttttggcccaagtgtgggattctagcttggtatcagggttacacagccactaagaatctgcttgtgacattgtgcctcctccttctccctgtctccgccctcgcaaactgaagatcgtcgccaaatttcgcaccagcattgaataaggctgctgtccagggaggtcccgtccctcccgatgaatgctgattgttatgcaacatgcttgctgtcttgggtaacaagatccgccaattcttcgcagtcttgagccttgcgctccaccgggaccaagccagctcaagatccctgcaatcatcacaaacatcaagggtcgatcgtcatctctttaccgtgattcgcttccagccgggcgtgggattcgtttccacgttcttgcttcacaagatcggcgttggaaccttgatccaacgagcagagaagaacctacggatcgggcgcggttgaaaggtcatcaccgtcttgttcccatctgtctggtatccggcacgggagctggcgattatgatgcagatcgggtgggagcatgcgcggtcaacgctgcgatcccctagtgcgataaccccgcctcgtcaatcgattgcgctgtggcttctaattgcgtacctcgcgtgtttcaaggttggttcgtaagccattatgcccaaataatatgatccaaatgagatcgtgggaatggacgcctcatttccgatttgatcggcatgactaatcgcggccgtcggttccagaggataccagctgtcactagcgctccaagatctgggagtcgtctcgtcgcgtttgaactcaggctcgggcatgcggacgcggacgatgacatgaaaacgtaaattaaaaatattggagcgtgtgggtaagaaagtcgtcatccccttttttctttctttctatcgcgctagtatgacgagctttggcatatcttctgcgccttggtttgatccattgtcgaaccggaatcctcttgtccgtgttgactcacgaggggggggatcgactattcccgcggttgtgatgctccacaagcacacgtctcatgcgatagcgtgttattgccccctccatgctcgccgccatcgatcggtttgttccgcggcgatgaacctggttagtacgcatattgcgcgcgagtgacaatatatccgaccgagagatagattgttgctgtagtcgttgagggatggggagctggaaatcacacacatcgaaacggactcgcaactcggccattcggttctcgcgctccaacgatgtcgtttacgatcgttctagaaggtggcaaagggtatccctgacgagtatatagagtgaactcgagtcgagttgtgtgagggcaaaacatctgctctcattctatctacttcatacaatccaaccaccaaagcactcacgcgactcactaccaaaagccctacataaactcatctccataatggtcgccttcaagttcctcgctatcgctttcctttcggctctcactgccaacgctgcccccgccggccttctcggtgagggtggtctcgttccccttcctcctatcgaccttcccgtcaccgacattgtcgagaaggtcagcaacacctttgacggaactcctatcgaggtcgtcggcgagacccttaacccggacgtttcggtcggagcactcgatccggccactggcgctgttgacgtcggtgttgacggaactggattattggagggcgtcaatgtcgctgtcaagaccaatggcgctaagcgagctgttcagctcgacctgtacgtcaaaagtctggttgcaaataccatgccgctcggactgacacccacctgttcgtttcagcggcggtgttggcatcagtgttcgcgacctaagcgatcgagacctgatcgaggagttgcatcgaaaagcagtatcagttgacctgtaagtcttttaatgaagctacagattgtgcatataactataaatcaattctgatatattacctcctgtgtgcgacagcggcactcgcggtatctcgatttaaacgtcactcctaccctggctgacaaatccctttacgaatcattgcggctgatttctacaacttgtatcaatagaataaagcatcttgacgttacaagtcacaatgtatgcaaataacaaccccatcaatatctccgtttatcataactcgcgttcgttccaggcgattgcgggcatttctggagtcgttggattcggcttagtgagagatgtgtgaccttcccagtgtcctcgcacgagccgtaaatatccatttgatacatgcgtactgagtgattggattgcaaccaagctcattaccttccaaatatcgtctcccagctcaatatccatattgtgactcgtttttctgcaacatggtcacaaccgtctccctccggatcattgttgtgtagggaaagaagtagatagtacttacgtacgatagctcatacggtaaacgcatgagatcgtggatgactggatcgaagatctgatcgcgtcgaggctcatacttgtcatgcttcgcaacgtcgcattcgggctcaagatcccaatttttcgacatgatatttgaggtttatcttacgtccctggtcatatctacagacgaccgggactcccgacgacaacgcgctcacggaaagatcggatcattgcaatacatctcactgagcagtccttcccagttgaagaacgactcgttgtcaaagtacgttccatcgacctgcaagcctgattgaggggcaaatggctgcagcaagaaagggtcgcattggatggcaggagcggcgccgtttgtgttgacgttgacgagggattcggtaggaattcgaggtggaggcacggtaggtcgtgtcttcggtgtgatgctgctggctaaaaggatagagtcagctcatcatcttccgccgtaggcaggatagccgtttgaacatacattgaggagtctcgctcaagcgaggagagacttccggtcgcgccagggctgcgctcgtacatgtttccaatctcgccaacaacgaatccatgatcctcctctctcgccttgagacggtgtcgtctctgccctggtccaagtccagctgccgcgtgtcgacacaccgctgccaactgtatcgttacggatgctttctccttcgcatggccctgagcatgaggggtcggtgcatcgtgatcttcacaaagctgacttgggcgataatgttttgagtcgagggtacttgcgctcgagtgcgtcgttcgtccgagtcgggtcgagcgaaaagtgggccggaaggtggttcatatatgtgtcgagtgctcggtcgatcgtcagcaggtcttggtacgtcttgtcgttatgtgcatcggtttgcgtaaagttgccattgctatgggccgcaggagttcgcttcaaactcaattcttggaacagggtcgaaatgcgctcgagaggagataagaaatgagcttgagccatctccaaagcatgaggcccttccactcacggagtcagctttatgttcgccgacctttttactgtccacggcttcatctctttcgatgtcagcagatccgtatccagtgccttggctgttcaaataagtcgcaagtgattggcaagcaggtcgctacacatcgcctagctgcaaagccaaggattaaccatattagccagcgaatatcatcgagcctttaaaggactcaacacaaacagaggcaaaaggggagaaacctgaaatcatcaatctgcttacctggccaacactcgcagctggatgatcgtaatgatctaggatatcatgggcagcatgaatcgctccgagatagcgtccaatcgtttgggacctgtgagtgtggtgatgtgaatgaagatgaaggtgatcgaatacaacagcacgatagagggaaaggtcaactgtaacaagcgggaatgagggcatatcagcatcttgccgttaatccaggtttgaacttagatttcgtgcggaatacctcggtcagatgagaattcaagctaagataacgtttgaatatattgatcttgaaatggcgggctgaagcttcagtcaaggaccttttatagacttcagaagatgtgagggctcaccatctcggtagcagtggtagtgcagatcctcgccagatctagatatcgtgcctcgataatcattcggtcggtttgcatggattgccaaacgacggtttgtaaaaaagggagtaaagacagcattctgacaagatagggcatgccccgtaccgctagtcggactagctgatgtgttggcacagggtggtaaggtagatgaaggttggatacgatgacgtcttcagcaagtacaaaggtacgaggtcggaatggaagacttcctgtacactgctctggttgttctgtttgagtatggagcgagtccagtcgacgatgaacgatcaaaggaagatgtatttcgtcctcatatgtcgaaagtacaaacccctaacccctagccccagcttgcggtcacagacatcacaagtcgtacgatccatcaggcccgatcggcccgccttcccgcacacgtacttccggttggctcctgcaaatacagtccgtatccgccatatccaggccgctcaggatggatgtttacgcttcgcctcgtcaacggccaaccatttcatccttctcttccttattcaacgcaaatcccaacgatgcaactgcccttagctccctttccgcaaagatgcctcccatcaggacgggttggcatttatggaacgacacgtccggctggactgatcttccgggggattctcgttccagcatcaatacgctatcgagtccgttgccacaggttcgacttgttgggcctcctacttgtcctcctatcttcatcagcccaacgcagagacgttgttcacaggaattgcatccgcatcaaaaggagggttttcagaaaagtgtcgaggaaaacagtgagtctaagtgagcatcgatacgggagtggctgattaatggatccgagggttgtctagtcgtccagttcacgttgagtgaggtcctgacaaacgtcgtgtgtcccaagcaacacgattcaagtgcctcggaaacgacctgtagaacagggcggctgactgttgtggtcttggattctagaacacggtagttctcttttattttccgcttccgaatatggggtacaggtcgaccggacctcggtattacccggttcatcaagcgagcgatcagtcgtccggcgatttcgccttgcctccagatcagggggatagcctcgatcccggtggtcgtttgaccgtaccgatgattcttctgtcttgccaaggccggtgagaatggacaaggttgtgtccgatgcgggccacgtatcagctgcgtgatgggagtgggatcggagatcggtgttgctcttccaaaccgaaactgtatatgctcggagacatttcggaaaaggcgtcgagcaattacagcccggcgtgacttttccaatcccgaccgaaatctcactcggacttggcacaggcaacggtcgtgccaagaggctggtcacctcatctgtggtagacttgcgacaagcctggcaaaggggctcgtcgctgcgcagctcttgtgggtcgattgcattgctaatttatgtttcagtaatacatcagctggtgattcttggtccgacgcttctcttcctcaagtccccacgccctgccctcattgacctcctccgacaacgacggttcccatgtccacccataccggcatctcaccaaagacgttttcaatagtgtattcgtctgaattctgaagtacttgcccgaccgacgtgtttctctgattggcatcgaatccaggaccatatgaacccacctcgacatactcggtcaggcccgggacgatgcgaggttctttggcagaccactcgataaacccttgcgggagcacaatatcagacatgtacgtgttgatgtaaacggccctggatgctttgttccagggacgtccgagagcgcacgaggcggctgtaaagggtcgaatctaagtagcaccctcgacattgtcagagtcgaaccactcactcaggtcgacatcgccaggtgcgtcctcggctcggacgatccttccgtttgcctgatagacaccataagtattgctgtcattgctaatgatcccggtggaccccttccaagccgttaatgctccgccatttccccggttcgccatggtaacgttttcgaacctggacatcacctattcagcgcatgcccagtcgagcagaagtatccgcactgctattctcaccaagccgtcccgaatccatataggtagtcggttccacctctgacctcaccaccataaaacaacgcgctaccgttcctcccgacgtacagggtatcctgccacgaaaagaacgagcatccgtaaaagctcgcgttggcgtagctcacgctgactgccccggacggtccagtctgtccccagtactcggtgccattgacggtctgtcagggcgccccatcagcggatgtacgatttggtaccacgcccgcactcactgctcggttggcgaaatcgatattatacgccttgaaatcgacgttcccaaactcatcctgcaatggcgcacccgcaggtccggcgccgatgagagacgcattacgattgggggaaacggtgaggaccatggcgtccgcattgtcttgaccggctgcttgagtggtttgattaatgaatgacgagttccagacatatacttgattgcttcgccagttgtaagggtctgcggtgattccctgcggcacaagattcgagatcaacctcgggtcgacgcgatgctcgatgttcccgacttgctagcagtgtcaatggccctggtcgagtcacgttgatcacctcgtggtaattaccaggtccgatcaggatcacatgtgaagaactgcgatgtagatattagcttgtgcactctagtcgagtcagacgccccgcttacttgtctgagggactgcatcggcctggttcgtgagcaaggtgctgagaagttccgatcgagcgcgtttcgactcacagactttcgatggcggtttgaatctgaaataatatctatcagtcaaggcaaatatgatattccaatcgttgcccggaacatctttacctggccatacccagcttgaggatcggtttgcgagacataaagcgaaccctcgggacattgatcaagctgccgaccttgagctcgtggatattggcaggccgcccaggtcgagttggctgtggcgtttgccgatgagatcaggaacagcaagatgggtataagacgcaacatttcatgtatactcgacgacgatacggtatcaatgacggtcgcaacagttaatcgacctcgacacgaagctactatatatgcacattacgctgatcggcccggtgatgaagcccctcgcgctaacgacaatgaccggcccggtgtctaggccccgcctcaatagttcctgctaatatcctcgatcaacccgatctccttgggctgccaatcgaaggtcttccgtgtccactggccacttgcttcggcatccatggtgacgaaaaacgtcaaccatccatagtacgcctcggcttcggcggcgggaatcgacctgacctcgagcgcgagtcgcttgccgatcgcctcggcgatgactttgaagcgcaaggcctcgtcgtggaaaccctgcagaacctttccggctggcgattcgatggccaggcggtacagcacagcggcgtccttccgatgaacggcgggccaacggttctgtccatcaccgacgtacgccacgtatcctttttctttggcaagttcgacgagcctgtgcacaaacccaccatcaccttgtccgtgaacagagggcgccagtctgagtaccatggcgttgacaccattctcggccagcttcagagtggccaactcggtaggcaatcgtggaaagtgaggtcccgcttcagtcttctccgtgactcgactctctttggcattcgtcttggctagggatccgctagtgacgactaatggctttgtggtacctcgcaagacctcgcccatggctccgatggcggtcttgtcctttgccgcagatccagcataatcagcaaagtcgtgaatgaaaccagcgtgtatgatggcttcgcactgcctagcgccctgcctgagaatgtccagatcctccaacgttcccataagggcctcggctccgacatcccgcagcttgcgagccgaatcgtcggacctagccaggcccaacacggtatgcccgttggcaagcagctcggggacgatggcggaaccgacccagccagtggcaccggtaacaaagacgtacatggcgatgacgtcggcgtgtgatatccgtgtgaataggggacgaccggtcgaggcgggtggcagtgtactaccgtaaaggcgtctcgaatgcgacgacgatgttgtgcaggcgtcccaaacggaacgacgacatcgacctgctcacgatgaaagcaccatatatggtcgtgcacggcgccaacattcgcgtgcgacctcgcgtaccgcttggcccgaatctccgcgacagctcaccaatcaacggaagcacaacttcgttactaacgaccaagatgtacaaagcgtccatgctaatgctgctcccactcggtcctccccgtcaacaaccacgattcgtaagctacacctcggaccccacgctccggttgaaatgcctgcgtcgaagcgtacgctcggatggcatatcgaaagtagcagttgctaagcgcgtctcggggtcagtcactgcagtcctcgctcgagctatacatcgacgacttacttggctgccggggtcaaataccgctgacgaaggtatgaccatgaattcgatgcgatcctctctgcacgttggtcatcctcgatcaacgcctgcatggcctggggcaaatgatcctcgagcggcatcgctacttccaccatgttttggtgtggcgaccggtcatccgtgttgaacaggtggtgaaagtgctgaatgtatcgcagcggatgagacacgatgacggatcgacacatttgcaaatacttgaggcgccccgagtatccccagcctgcccagtaaaggagtatcagcggcatgcatcgacgatccgtcccgacccgactcgagctcaccctcgacctgcgccaagaaccgataatcgcaatgctcagctggggacaagaatccgctctccttgactttgccccaatcaatctcgccaacatcggaccaaggctgatcatgactggctcgcaagagttgctgtgaagtggtgcacagtaagtatacgggctcgcttcccgggcgtctaaacgacgaaggactgacctgccggacttcaaccatgggtgaaccacgccagagtagcttgggtatcttggcgtcccaacttgggggttctgtcaaagccggatcgtattaacaaccatgtttcgtgtggtcactcttcgcttctggtcgtactcacggtcttgcgtcatgttgttcacgcgcatctcaccctgatcagatacctttttcgccaaagcccactcccggtccaacgcggcctgtctgatttcgtgatacgccgaagcatctgatccgaggggttcaggccaggagtaaaagccaaagtctgctcgtggtccgaccgtctggtcagtgtggaatcttactagacgctgttgccgcacttgcctggcatcaaccaaagctgccattaagaccctggatgtcagcaaacggtacccctcgccagacagctcatccaactcacattctcctgctccggtttgcgactcagggcaaacaccgggtcgtccccatctccattatctccgctctgtaccacgaacctgcatatcgtagaccgtcagatttagggccgggcgtgctgaatcgattcgacgcttactcgacatcgggcaacggctcggtcgagctgatgatcatgtcgtgtatcgctgcgagactcgcctgagcgcggctgttgataccgccgttccatcttcgaacatacagctacgacgatcatcccatcgtcagctccaagcggactgccgctggattcgacacccactctgtttctccaaatgagtaacctggcggaccctttcgattcggccttgtctagatcgtccaaagtgatcccacccctacgtttggtccactcaaccgcccggtctgcttcgtggtacagcctggggaacaacacctcacactgatcctgggtcaggtgcagattgtcccccagtgaatctatttcagctgtgggggacgagtcttgatcttgccaccccaacgggtatctcgacgtcgctgccggaatccctttcaagaacgatatcatcgcgatcaaaacgagcagaccagctagcgagacgacggcatgtctccgggtaaagccaccagcaaagggattttgaaaggccggcatctatgatcgagtcgtactgtatactttggaccgcataggccgccaagtcgatgtgctgtagcatctgattgaccctcaacgatcaattgatcttcattcgactgggtcggggaaaaaactggaatcggggaccttggcctgtttacggcagagctacctactgaatactgaatcataggtcagaatttcgtcgggatcgtcatcatttcgtcgtctacagatctacagctgctcgtcatatttgtcgtcgtgtatcgtaaaaatgtaaagcagatcctctttcccgcccgccccgcttgacgcctgtctaatctacgggatccctgcattgacaacgatctcccgatccctctccacaatccgccaatgccaactgcgaacatctaaaaacgttgggccagctcgcctcgagccagtgtcctgtccaaagcagtcgagtcagcgacatgtgtggggccgaatcacaggagccaacacctacccaacgtcggatcgctcggcttcgaattccaccagccttcgtcccagatccaggccttgggatcagttgaatccttttcgacgtcaaagtagccaagcaaattggcatacgtcccgagcggtacctcttgaatccgctttcgggaggcgaggaattgaccggcccaagtgatctgcggtgacgacgatcaggtacgttcatcgaggagcaaatcggccatcacgctcacgctaaacccggtgggagggcagaggtctccgttgaacatgctatagatctgagcgaccctcggatagctcatcccgtggctatctttttccgaaccatccgctgtacacgatgcgttgaggtatgggccaaacgagacgaatccagtgtcccggtgcacctctttcagccggggatgagcgacccaatcccacgccaaatgaggttgtaagaaatacgtctgccgagccaggggtgctcgaggattgttgtatcgcctcgtaatgtgttgctttgagacataaacattagccgactgctgcttcgggtgcctcgcctcggtcaccatcgagtgctcaccagatacgtctccccttctcgaccgacgttggctaacgccaccacctcgtccgccttgacatcgtgtagcaatcgctgcaagccttgacggtcgctacccgcgatctttttcgaatacaccgtgactctagaactcgacatacgtggcaacgtgtcgcgaacctgacggatcgtgtcggcgagcatatcgacgggttcatcgtagtgactgacggccagctcgaaatcgacgtcggctcgccagttccgcccggtcaccatattgagttcgccccgaatcaatcccattcccagccctgggtatcgccacagactgatcaggacggcgaggcatgccacgacaccagcgaccgccttgacccgtttcgatgtcgacgccgagctcccttgcgtctgcgtctcttcctgtgactcggtcgcctcttgcttggcgagcaggtgaccgacaatcagcatgccagcgataggccagcacgttttcgtctgtatcaaagccaacatcgtagcgcagaccgccagttcgagaaagaccacgctcgatgtcggggatgacagcatacgaggcggattgagggtaaaggagatgaggaccgtgagaagcacaaagatggcggccagggtgggctgttggacggggtagaccgctagggaacccatcaagctgaataatacagcgagctagtgtgtgcgggtctttccttcgtcagcatctcgatcactcgacttgttgcgacgacgcaagactcacccctgtgcccagcttggtcctcgttccacccagtcccgcataccttttgcccatatcgagactcagaaagcacaatagtcctagtgactgcgtccacccaagcggtccctgcaagacgtacgccgagtacgcactgaccagagtcaatagcagcaaggccgtcacgggtcgtctcgttcccgtcaggctctgctccgttcaccgcatcatcagccttttgcacgaactatggatcgacgttggacttacgagcaacgccagaccgataacggtattgttccccgacatggccatgctcaggctcaacgccaaccctgcctcgatggcagccatggcagcctccgctcgtcgtcctctaggctgcagtccggacccagtctgcttttcctcgtccgacccgggttcatccgtgtcgctccagctggccgaacgcctcttggcaaggtctccgactgccctgcctacgatcaagagcacgggcacataggatttcaatccgtccgtccgcgtgtggggtgtcgataggtatacgacgaggaagagcgacaacgacgacggcaggacaccagtaaccaactcgagcgcgacatttgccaatccatacagtctgtcgacgacgtgatcgggagtcgactcggtcagctttgcagacaggcaggcttccagacttgtagtgactcgaatgataccgactgtggtagactgacaacgctggctctggtcgtatgcgtagtggacaacctatctagactggctgcaaacttggtcgtcggtcgcggctgatccggaaatgtcgacatgttgtgagcgatgtacgaccgatgtgctcgagggggtcgtcatcacagacatcattgctcattgcccgtggctcgataacgacgacctcacctgagggtcgatgagcaagctcgcagtcgatagggaagggaatgacggctatcgctcgactattccggacgctgacctatttttcaagtcccaccctcgattttcagagtcgagccgtcatcgtaatagaagacgccgatcaatcccaggcgggtgcaggcttcggaccatggacgccctgcaatctgccaacattccggtcttcgcgacgcctcacattgggcgatgggatccagggccggaacatttgacgctgacgctcaagcgaacgtgggtggcgtgaggagacaatgtttccagctctcggaatgatcaagggcactcgaacgaacagatcccgatgaccgaggtgtgacggcggtgcattgcggaacgagaaaactttctttttcgtttatttcctgatcctccacgctgtagccgcagtcgtgattcgcgtcactgctcccgccaccgtcgcactgtttgctgcgcctcgtgcgacatttggaatctcgtaaacacacaatcccctcgatttcctcgtcggaatcttgacgagactcaaatcggagagtgcgacagatcggtcgtttgtcaaggaacagcgagcgaggttgtggagtaaaaaaagtcgcacagcgtctcgagatgaccgaggctggacgacaacacatcgtgaaggtggtcgtttcaacggccaaaaccatatcatcgtcgaccaaagaccttcaacagcgattgtcctatccgctcgtcccaagattgttaccctgcaacgattgaccacaagatgcccgatcaaaacgtccaagttctcgttatcggtaccggtcccgtgagctcgctcggcaaatcccgacgcactacgtactaaatctcgtcgcaacgcgtcctccaacccagaccggactcggtgcagcaactcgtctcgaacagctcggcaaggactacctgcttgttggtcaagaggacgtcgctggtggtcttgccggcacggatcagaccgagcaggggttccttttcgactatggcggtcacgtcatctttaggcgagtcgcaaagttcagacgtcgcgcctcgtcgttgctaattatcgaatgcaaccgcagtcactatgcctactttgacgatacggtcaacaaggccttgcccaaagatgacgactggtatgaacatcaacgagtgtcgtacattcgtagcgggaccgcttgggtgccatgttagtcgacgagcgagcggatttagtatcggccacctactcatagaccgccccccctctcgacccgccagacccgtaccaaaacaacatctctcaactccctcaatccgaacaactggtcgctttggatggacttctcgaagccgccgagatccgtgccgcgacccccacggtcaagccggtcacctttgaagaatggatcgatcgcaatctaggcaaggggatcggcgacatgtttatgcatccgtacaacttcaaggtgtggggcgtcaagaccagtgaggtgggtttcgtcgttgcacgaccgatatccccagctagatctgcgcacgaactgatggtcgaacccggccggtagatgcaatgcaagtggctcggtgaacgggtcgctgcgcccaacctcaagctcgttgtcaagaacgccatcacccgtacgcttgccggtaactggggacccaacgccacctttcgattccccgcacgaggaggtacaggtgggatctggaaagcggtggccgagctcttgcctcgcaaaaacctgctcgtcggcaagattgtcgagctcgacctcgttcacaagctagcgcgactcgattcgggtggtacgatcgcctatgacaagttggtcagcaccatgaatgtcgatcactttgtcgacatcgttcgcgtcgactccgaggcggacaagagcaagattgaaaaggtcaaagaggccactcaagagctggtctatagcaacacgatcgtcatcggtctgggtatgcgaggcaaacggcccgaacggataggtgacaagtgtgagtccgggcaaggcgagcagatcatcgggcgcgtcagactgaccgatcggggctcggggcgcatcaggctggctttactttcccgaggacaatacgcccttttaccgggccaccatcttctcgaactactcgccgcacaactgcccctcggccgagacctcgctcccgaccttacgtcttgccgatggatccgcccccacctcgagtgacgctgcgtctggtccttactggtcgttgatgctcgaagtctgccagtcgactcagcgtccgcagaacatggataccatcctcgaagagactattctcggtgcgctggccaccgatcttttgcgcccggaagacgagatcgtttcgacctatgtcaggcggttcgagcatgggtagtacgtatcgaccgtcgagcatgggatcccgttgcgcagttcgaactgatcctcacgcgggcggctgactttatagtcctacaccgtccctcggtcgagacgccgccctcggtcgaatcctgcccgtactcaaggatgactttgatgtttggtcccgagggtaagtgctgtgtggtctgtgcgtggttcgtaccatggcttactcgtcacctcggctctcttgcagtcgatttggcagctggaaatacgaaggtgggccatgagcctattttggaaccgcaacgagatttcactgacctggccgtgttcgactctccgttagctggtaaccaggaccattccgtgagtctaactcaaagtcctctttattcgtctcgcctacatcttgctgacgcgcgccatacttcgcagttcatgctcggtgtcgaggctgttgacagtgccatctttggtactcccgagatgacgctgaacgagacggattgggtcaacgggaggcagaacctagaaaggcgtctgagttagcgctttgcgtgtcagagccagcacatcctctagactagtttgcgacgacacgatagacacctacacatacattcaggcttgtccctatacattgagcatgcatacacgataccatacatgataccacgaatccgacacatgatcagtcggtcttgctgcgtctgctgggcggcgcatccaatcgtaaacctctcaattgatggctcgggcccgtcgtcgatctgaactaacgtaccgtaatcaactagccgagcgcatctgttccccatgcggggccttgtttgcaaaccccagattttgacggtccgacagggaaataaaccgagatcacagatcgatatgacatggtaccggcggcaaggacgacctttacttgtctttggccaacgtcgattcgctcacaggtggagtctccatggacccgggtcgaaacaacctcccgacattgtcaagtcggccggttttattgagccaggcacgcgacgaaacagacgataaaccccccgaagcctgactttgacccttggttgatgatcagctgccaattgcggaccgctcaattccggttagcaagtctccggtagcaaagcatgagagctagagtgcgtacgatacggtagtgttgtcagttgtgcacctgatgtcgttcgaatatcgtcgtctttgcgaggtggtcatcgatcgtgaacctcccggctgcctgcctccgtaagctccgagccactctttttttcaactcacggagcggaagcgcatctctctcccattcgccagcgccagcccgccccgtgtccccaaacagaaaaccatataacatcatcacaagggcagtcgtcgtcgtctctggtccgatccgagtctagtcagatccatcatacctgctcaatcccgatcacaaacatcttgtccttggacgtctgaacttgaaatctctctaccaatcccgtctcgcaacgcccacaatggagtctcccacgctcgagaccaacaaaaagcactatgatgagcctcacaactcgtttgcccaggatgcaaaactcgccaccgataaggaacagtcaatgactctgatgcagggaattcgattgtatccaaaagccatcggttggagtatcgtcatttcgacatgtatcgccatggagggctacgatctatgtctattaggaaacttctgtgagtatcacgcacgcgagctcggaattgttcggccgatcatgctgatctcgatcggcgattcgatttgcagacggtttccctcagttcaacgaaaagtttggagagcttggtcctgatggcacgtaccaggtccccgcacgatggcaggccggcttgagtaacgtgagtctgattgcgaggtcgtggctctcgcccgaattggaacgcagctcaccatcgatgacgtcgcgtgcaggctgccaactgtggtgaaattatcggtctcttcatcaacggtctcgtcgccgaaaggttcggatacaagaacacgatgctcgcctgtctgatctcgatgatcggattgatctttatccccgtctttgcgacgagcggatcattgattcaactgttgttctactacttgctcgccggcaagtccattttttcgcgcgactagcttttaaagacaaatattaacctgttgatgccgtctcgtaggtattccctggggtatttggcaaaccttgaccatcacctacgcttccgaagtctgtcccatcgcccttcgaggatatttgaccacctatgtgtgagtccgggcgagcgagcctcctgcacgagacgcgccgctgatcttgccccgcccttaacgcgtagcaacttttgctggggaatcggtcaagtcatcggtgtcggagtcatcaagtcgcagctcaacaacaagaccgagtgggcgtaccgtctgccttgggcccttcagtggatgtgagcagacgacgaccggacatgaagccaaatgcatgcaggctgacccaagacgactcgacaggtggcttcctttcctgatcaccggtgtcgctctcgcccctgaatctccctggttgctcgtacggaagggacgaatggaagatgccaggaagaacttgctccgactgaccagcttgaaccgtgagaccggattcgatgccgatgagactttggccgtgagttcgctcgcttcatctcggtgttgatcgacacgcctgaccttgcgaaacgacacgtgcagatgatggcccacaccaccgcgatggaagcgcaaatgaccaccggctcatcttacaagcaatgtttcaccgggatcaaccgtcgccgaaccgagatcgtgtgcatggtctgggctatccagaacttggcgggcaactcgtttaccggttacagcaactactttttgcaacaaggtggacttcccccctcgtccgcattgtcattcgtcttgggccagtacggaatcaactgtgtcggtgttttcggagcttgggccttgatgtcttggggattcggtcgacgatcgctctacctctacgggcagtgtggactctgcctcatgctctgcatcatgggttgcatgtactttgtccgttcgagtcacccagaagctgccgctttggccactggagggatgatgcttggttgggccacggtctaccaactgacggtcgggtgagtttcgtgcctagtcgccaaaaccgcacgacatcgctgataaccgaccggcctacagtaccatctgctactctatcgtcggtgaaattccctcccgacaactcctggtcaagacgatcgccctgggccgaaacgcctacaacgttgtcggaatcgtctgcagcgtcttgactccttacatggtcaaccccactgcatggaactggcaacagttgaccgcctttttctgggccgggatctgcttctgctgcatcatctacacctttttccggattcccgagaccgcaggacgatcgtttgccgaattgggtgagtcgtgatcggcacgaacagttcttgtagaatgttccctggcactgaccgccctcgttcccacgtagacctcttgttcgagcaccgcatctcggccaggcgattcgccagcaccgacctcgacgtcttcgcctcggacgaggccaagctcgccgcccgagccgtcgagatgggcgaagacaaggacttgccggtacatgtcgagaagactgccagggtgtgctgagggatcgtgtaaaccgggcgaaatctgggcgcttttaggacagacgctcccctcgcaccctgcgagaggttgttttattttcatggaattgtaactcggtactggtggctctgctgtccgcctatctataagctagttgtgaatcagagtacgatgaaatcatcttgacagtcaaatctgatcgaccctaagactcacgggatgccctcgcgcttcggcgtctgtccccgtcaataaaattccccgatcccgagtcgtcaaagaccgaccgacgcatgctcaatcaccttgagagcgttgttggcttgcatcagcatggtatacatccctctcaacatcatgccatggtcactgatcgactcagtcgtgcctgcctggatctgtcgagtcgattacatagactcgccatgcggatgatcctcaacagggccacactcggaccgaaacaagcagctctggcagggggtctgtgtctgcttctcgtcttttttttctggtcgagaacggatgaacctgcacctatccttccgatagccactacgaggctcatcagtgtgagtgacgaagcgtgactcggcagtcagtggaatcgcattgatcttgtaccaaaaatatcggctggtcctcgtctagattccgtcgttcccaccctctaggcttgtcaaacgaatagacggatacaacgtgtttgacaatgtcctagctcatcatggtcagctgtgtgagtttacagtgacgatatggactcgaacttgggctgatagtccacgctgccagatatcgtgccagaagacatatcgagcttgcccgatatggctaccctggtggccgattctgatccgcccaaactgacggtgttgaccaagagtcaggcggccgaaatgctcgcatccgcatgcacgtcgaatcccgaacgttgcaacgagatgggagccggtaaatcagagcacgtcgcaaggtcaattcgaggactccagttgaagggttggacattgatataggtcaagaacttgaagtccgccagctggacggcacgacggtatgatgagcctactcctgtctcggctatcgtcgcatgatctgcactaatgcgccgacgtatacatagctctacttggccgacgacggcaacaacgaaaggacttggcgtatgaaccgatatcagtttgtaacctttgtccgagctgatcagtgatccccccctgatcaaatctcgcttggttagccacttcgtcgtcgacttgctcttcggtggctatcgggctgccatgagcagtctctcaatggctggcgtcgattcagtgatcatgggcaagactcgcgacgtcaataacatagttgttcataccgggcaggcatggcgggacacagcgggattgaacgaaatgatctcactgaaaacgctcaccagtcgtgagttcagtactggatagttggtgtccgaccgttgactcaagaccacgttaacgaacagacatgattgaatcggacgaatggcaagaaatgaccacccacagcgatatatggctgctgctcgacaaaggtaagcccctcgaaccgatcgtcaacgacgtcccggcttacgatctcgtcgcttctaccacctagtcgtcttgatcgatagtacggcagctctgtacgatcattcatcagaggccttcgtgtggaaccagacgtcactcgacgtcctggaaattcctgtccaggcgaccaatccgttcgctttctgggctcgacccagatggcggatcatccagcacctcggtctcgctataccgaccttgcgcaagaaacgcaacaagtcgttcaacggaaagcagatcaaagtggtctacctggatcaacagagcagtgacaggcgcctcgtcaaggaagatcatgactttgttcttgaattgttggagtcgctggaatctcaatctcgaggacgattcgggcagaaactggcggccacagtggtggatgtcgcggaaacgagtcccgaaagccaggtccgaagtgtattggacgcggatgtgagtcgcttcagaaccgccctctagccaacttgtcacgtattcaacctctgctctaccctaccgaaagatcattgttggagttcacggcgatggccttagtatgcgcttatccttctctttgatgggccgacgtgatctgactattcggtccttcccctttgcagctcatgccgtatggatggctccaggtggtgtcgtgatcgaggtcaaccgattgcaattagccaagtcgataccatcatgctaacgaattgtctatattgcagattctccctccccatggtgaggaaaagcttttcgaggattcacaatgtttcccaatctgacgacgcagtgaactgttccccggcagcattccttcgcaaatatcaatcggtttctgccgctcttggtcatagacacgtggccatagtcagtaaaaccgaacgaacaggtggagggctttgctgattaccatcttgttcgatgctagtggaatgaccgcgaacataaagtcgaagagtggagtcagacccctcgaccccagggactcgacgttttacatgatgccgtcgaaattccggtgagttcgggagactaacgctagtgtggacatcactttgactatccttcgttttgacccgacagctcgaccatgcttttattaggcagacattgcgcacccacgtaatgaggatgctccctggagcgatctagtcctgaataaatcccgacagatatgggccttcaaactgtatcgcaacatcattgaccattgcatagtgtgaccttgacgtagtggtgagacagtacaaccatcattgtttttgtagatgggaggtccgttgtcacccttcagtctggaatcaggccttgcgcttgaggcccacgacttctccttcgacgatctcgtacgagtcgaacagcttgatagcctccttcgccgcctgcaaagcgatcgcttgagatgactttatttgctgatgcctagcttgtctgctcaccttgacaccactggctagcatacctccgaacgtggcacccatccgattggcgccatcgagttctgaaggggtggcatgagttcagtcctatcggaacacaaggtgacaataaactcacccgacaattccattcccccagtgatcaagcctggtacgatttcccgcgtggcattgcttttcaggtaaaggaaaatcaagtcagcagaatccctttagatgccctagcaccacgcttacacgatgtagtcctcggcgcatcgcatgttcagctagaaatgtatcatgagatcaggattcccgcaaagaaccgagcaagccgacctgaacgtacccctcgcatatctccgagttccttgaccattcccatcgccgccaatcgcttgaccgaaaaggctccgaaaggaccactgatcgagtagctcgtggttaggtgtcgtcgctgacagcccgtaaacaagcgattcgagacggcttactcgtgaccggcaaaagaggctacgatcggtgcggtgatggtctgagggtccatacagctctgcagcccgtgggccaaagtgaccagggtcctgcaaaggcgaattcgtgcgtcagtgccgcgtgactgattccttttatcgcctcggactgaccagttgctgaccaccccagcaactctcaagtttgagctatcgagaggatctttaacggtgatcaagtcttcgaccgcggtggcattgtacactgaacatatcacccgctgccgtcagtcgcattgttgaatttccctcgggcgaggagcgctcacatttgacgttgggaaactaaaagtcgcagacggtcatatgagtgtgccgtcattttgcgctggtttactcatacatgagaactgacctgcaacaccttgctgagtatggtcgatgtgaacaaagcagcgtgcctgacgacgacctggagatcgcggcgcgaacacgtgagacatcattagtatgacctgtctatacaacatacgtagtcgccctcgtcttcaaaaggaacctcgagctcccgcaaaaagttctcggcaggcttgcgtacgaccatggcagacatgagttgaccaccgagccaggcgccgcctagacagagagacggtcgcttaccgaatcagtggaagaaaatagccgaaatcgggaagcgccggaacctacctcccggagctaccccagcttccaaaatggtgatcatcaagtctggtctttccttggcgatctggtaggcgcaactgagtcccgctgaaccgcatccgataatcacaatgtcggagatcgccgttcggtagaggtcgtcgccatatctcttggtcatggcgcgggcaacgtgatgctcctgtcacggcggaacaacgtcagtctccgatcgcaaatctgaagggcgcggcatatcctctgactttgatgggggcaaacttgtagccgccttcccaatcttcgataggtccgatccgggtgtcgaccagttcactgccatcgtcagacgctaccgagctgaccttgatcgaagccggaggtgacagtagcttgatcgtttcaaactctttcatagagatgggcgtggagatggcatgtttgtggtccagaggagccagacgggtggagcagatggaagatttgaaagaggacatggtggcgcgcgggtaaagttgcgagcttgaaggagacggcgtatggtctgcttgttgtctgggctactgggtcgaatatatcgactcatctgcctggctacatatatgccggctttcatagaagacagagatatcggtctgtgagatccgcacatcgacgagtgcgggactccgtccatgattcctccgccgtgcgattgcggatagatatgaaacggcccatcgccccggatcaaaagtcgcgccaaacttcggtgcggttgaggggtgaacgacaaaaaggcacggacgtcatttgttccgttttcgaatcgctgacaacggatgcgaattcactaggaaccctaccaacgccatcaatcgattatgggtgtcatacagacgattcggaatcacgacggagaattgtttcgtgaggactacttcggtcaggttccagagttgtactcgtacgtacaattgcgatcgtccgcggatcggctgctttttctcgatactggtatccgcaaaacgccatcgaaaggttatccgcgccgaccgcgccgtggacaatttcgaattcaattcggcactcttccatcagggacggccatcggatcactgagcctcacactcaacaggacacctcggcatgtcaacttgactacggaatcatgaactagataggggaagacggagcggcgcttcacttgaacagagcagcggcaaaaggcgctgcacgatccgttcgaccgacattacaacacttcgcattaaaagtaaggatgtgatcaaacctagcagaagcttctgtcattataacgagtctgtggtcgagaagccactatcgcgactcgttgcccgtcccattgggttcgcctgctcgtaactcccttgtccgcttcacaattgcgatcagactggtgatcgagacttgaagcaatccttggatggcgatggacttgtctctcgatctgcacctggcaccttgaatggcaacagactcatcgtgaataacccctcacaaactggacgagctcgtcgattaactcctatctcgaaatcgccattctaagggagagtcccaggttcacaaccctctgctatgggatgttggagctggaaacgcagatgcagggcctccgaatgccgtcgctaagaccatgagtagcaggaaaatcgtctgctcagcatgcgaaacacgtctacttgtattcgtattcacacatgatcaatgatcaatcaacatgcacctggatcctttgaccccaatagatcgcgcaactgcccttccaatcttatgacccgctactatgggaccagacagtcgaggtggtggggtcgtctgagggtttccagtccaatgtggacagtccagaagacttcgatgaaggagagtacaagtggactccggaggtgggaacatgtgcgtgcgatcacaccacaatctttgagattgattttgcatgtctagtacaacgcggacgatgatcgcatgggcctgatggatgcttgactgccggtggcattcgttcgaatcattcctttgagcgccgtatcgatctgtcacacggccgatcccgttccgaccgtcagcgctgctctgtcgattgactactgatctcaactagagctcgagaatctaacttcatcctcgcttcctcacgtttgtggaaatgtcactgtcgttcgcctcgacccaagatgcgatactgacactcgacactgcgaccccggtcggtgtgtgtgaggcgaggcgaggcaagcgcgaaatgcgagttgcgtctcgcagactggctggtgcgagcgatgtcacgatgggctgcacgtggaaaggatcgtgtcgtcagatgagcttcgcctcagattcatggatctctctggcctttatgtgcaagcgccatcgttagtcgctatcgatcaagacgtacaatccaagtcgatgagacccctaagtctcatgtttgagcttggacttgtcgcccaaaagttgattgaatctggaactcgaggatcacgctatcgtcatcgttggatcgttggaaggtcagacaggatcggggatatgactctattcattcacctctgtaatagccgtcattcgctagctattgtacttttcgccgattcctatctaccgtcgacgaatctgctgacgcctatcgttgacctctgtcaaaagagctcatcatcgacccgaacatacccccccacaagatggcgttttcaggtcagctcgtattctccaagcaacctgccctcgatgtcctttctgacctcgaagccatgctacccagtcgagatcaagcacgctggcaagcaacacaaggtcgagtacaaccctgtcggcgatgcaaaagctttcaaggagagcatctaccaggtcactggcgtaccaacgggtaggccctccgagatatctttggacctcgtcagaatcgccaatgttgatgaggatggctctgaccgcagatcgaatgaaggtcatggtaaagggcggtatccttaaagtgagcgtgtatggtctcgaactcccagtctacagcgagctcacaagctgtcctctctgatcaatcaggacgacgctgatatgagcaagttggcgatcaaggaggtatgtctcgaccgctgtacgagattgtcgaatcgcccatgctcatctccaactaccggcaacgatagggccaagtcatcaccgtacgctgcatcttgtcacgggagcattgacggtcaactgatcactaattctcgcgctccaggtcatcggcacggctggacctctgcctcaggctcctgtccagacgctcaagtttgtggaggacatggacgactcggatctggccagtgcagtcagtcgaatgtcttgccgtgatgcttccctgaacccaagtctaaccctcgacgatacgcccttatacccagcttaaacaaccgcctggtttgaccaacctcggcaatacgtgctacatgaatgcctcgcttcaagctctccggaccatcccagagctcaagacggcactcgaatcgcacagctccaacctcggcgcccgtgggaccatccagcccgacagtcgattgacctctcaactgcgttccttgtttgtcgggatggaccagacgaccgaggcgatcccgccgtttgggttcttgcagacgctgcgtcaagtagctccgcaattcgccgaacagagtcaacacgggggttacgctcagcaaggtgagtccgagaccaggtcgcgcgagatgaatctccccgtcagcttcctaacgcaggagaaaccttgggttgaattgtagatgccgacgagatgtggacccagaccattagcgcgttgcacagctcgcttcgttcgcccgtcgagggtgaatcgagtcgcggttcgttcgtagacgactacctctcggccgatttgcagcagacgtgagtcgtcccgtcgtatccgcgtgtcaacacctgtcgcatcatctgaccctgttcgcgtggtcataatcagtctgacctgcgatgaagcgccggaagagcccaagaacgtcaagaccgacaaggtcctcaagctcgattgcaacatcaacatcaacaccaattacatgctcaccgggatcaaagacgtgggttccacggtccgggcgagttataccctttggttctgccactgaacaacgacgtgacctcagagctttgaccaaaagatcgaaaagacctctgcttcgctcggcaggacggcagtgtacacccagtacgcctcgtggtggaaggtgttgtgccgagacgcgacgttgacccgggtgtttgtctctgcaggacctctcgaatcgctcgacttcctgccaacctgaccgtccgtgagtccgatcccggtttgagtcgcgacatgttatgcaccgagctgacaagccgacggatttgcgtatagacatggtccgattctattggcgagctgacgttcagaaaaaggccaagatcatgcgtaaagtcaagtttcccatggaactcgacgtctcggagctggtgagtgatcgttgacggcaaccacgacctgacgcggagcaggagtttgctgacgtgacgattcgtagctcaccgacgaactccgggcgcaacttcgacctgtcaacctggcgctcaagaatatcgacaaggcgaggatcgaccgtgccaagcaacgcaagaagcgcaagaacaatatcagccgcggattgatacctggtgcagggtcggcctctaacagcgcagactctgaagctagtgctggtggtgccgacgctcctgccgcggatggtacttcggccgagatggagacggatgaagtgccagaagagacgatgcgggaaaaggagaggcaagaggtcaaggatctgatcgaggctcagggaggcggtgtcgacaagggtgccaaccagaccggcatgtacgagttgtgtggtgagtgtcgtctgccgaggtcgcgatgccgccatgaccatggctgacccgtgctgcctcgttgtttttttcttgctcacagccatcgtcacgcacaagggcaactctgccgattcgggtcattacattgggtggacacgccagcctaccgaagagaatgggatccccggtgaagaagattggtggaagtttgacggtgagtccgagtcggcgtgcctcgttggtcgacgacgctgacgctgatgacgacgatgacgacgacgacgacgacgacgacgacgacgacgacgacgacgacgacgacgacgacgacgacgacgacgacgacggtagatgacaaggtatcggttgttcccgtgagcaagatcatgacattggacggtggtggtgaagattccacggcgtacattctattgtaccgatccaaggttgtataagatgcagtagtagctagtagacggccaatacgggggtcgttggcgatgaccaccttgtgcacgcatgaatgcacgtttcaccccacccctaacccccccgatcaacttttgtttacgcgtcgccccccaagctctgcgatcgaaacgtcaccagccaccagctccagctagggtgaccaaggtagcaagtagagtagagcagagaggctactactgtatctacacctacgtaccatctcctacctcttgcccctcttccttgatctcaaggactccttggttggagtccccagtatactcgactcgtccatcaccaacttggccagcttctcgctcttacacacacctttacacacgtccatcgcggcggcctatataatcggacttcgtcgcgaccaccgaccggacccgttcgtcatcatgccgccacgcacaccttcacgtcgtaacggtgcgggtcatcgatcatctcaattcgaagacgatctcccgatctatgggatcccctcttcgcccgcaaatcccacttccggatcgataggcccgaacggtgggatccgaccgggttccgggttggtccccggatcgacgagcaggaaatccaacgagaatcagaatcacaacctgaatcacctgctcggattgaggatgccaccacgggtcgttgtcgggagtgggatgggatcaagtgcgtctgccggttcgccatctgcagtacccaggaggtctcgagggatcaaaaactcgttcaacaaggagagtaagtcggcccgcgattcgatcgggttcgggcacggggctttaaaacgacgagggtgacgctgaattcatcgaccaatgctggtctttagaatacgtcaatgctcagttccgtttcgtcatgaaacctagtggcaactataccgctcatttcgccgatcccgacctgtgagcagcgtcgtcgtcctgtgcctcgtcgtgtttctaagacgacccgaccctgcctcgcgccggctcgctttttcgcgctctttatagcatctttccgttccaacagatcctccaagtgatcgtccctacgacgtccctgctctctctcgcccagggtcaagacccgcacgatcatgctcaggagcagcgtcagttacgggaacgcaaggagcaagaggaagaagcgttcaagtgcccgatctgtctcgggaaaccggtcgcagggaggatgaccaagtgcgggcatgtgagtctcttcccatccttcctcacgaggccccgtgtgatcgtatgccatctgacgtctcgtctcgtgcgttctccatgtgtgatttttccagatcttttgtttcccctgcatcatccactatttcaccttgtccgacgtccctcgatcggcaaagtgtccgatttgcggcgagacgattcaagagttcttgctcaagagcgtcaggtggtgggacgaggagagtctcgcttcgatcgatgcgggacacgggatgacgaacgagatggctcccaagctggcggcggcggcggcggcggcgacgtcgacgacaccgacgacgacggaggatcccgttttcgccgcaggtgacctggaagaccttaccgaccacgtggaatccgccgcggagccctcgggaaatcgggtcaagatgcgtctcgtgcagcgaccccagatcacgacgtttgctctccctcgttccccgacctggccttccgaagtcgtcccgctcaatcaagctccctggcatttcatccccgacgtcttgtcgttttccaaattcatgctggccacgtcgagctacatgatcgcccagttggaacgagagatggaagagctcggtcaagaacgtttgaacctgcgcggggacgagctcgggtcgagtttcgtcgacgtggccatgaccaaggtcaaggaacagatggacaaggcgagggtcgagctggacacgcccgtctttcgacggatggaacgcgaggcgagggacgggatcgccgaggtgcaagaagggtatagacgacgggtacaagaggtcgaaaggaaggagcgggagaggcaggccaggtccgaggaaggaggtatggcggtgacggacgggatggccgccttgtcctttgctgagacggatcgtgtcgcgccgaatgccgccgcgtccaccacgatggcgacggcgtcagtgttgtcggccgatgcaccgtctttccacatgtcgagcgacacgccgtcgaccacgacgaccaccacggcgacgccgagcaaacccgcacggactcgaagacctgccgctgcctcggctcatcacagttatttcatggcggacgatccttcctatttctactaccaggccgacaacggtgccaatgtctacctctcgccgctcgacatcaagatcctgctctcgcattacaagtcgtacacggcgtttcccgatcacatcagcgtcaaacccgagggtgccgatgaggggtcgatgaacgaggacctgcgtcgacggtgcaagtacctcgcgcacctgcaattggggaccaacgtcgtctttgtcgaagccgatctcgaagagacgctcggcaaggaggcggtgcaggcgtacgaagcgcctttgaaacgacgtcgtgaccggaagcgcgaaaagacgcgcaaggaagatcgagccaagagtcgttgggaggcacaggaacgcgagaggttgccctttgggattcagacgcacgggcacgccgtcgggggtccgagcaaggtggccacaacgatgggggccatcgatccgggcgcaatgctggacgaggattttttgttcgcgctcgaacgctcgaatcagtcgacggatgggctcgccgtctcaccggggacggcgagcttgatcgcacacatgtcggctcgacatcaagcggcggatgggttatcaccgagcgggatctcgacggggagcagttcagtgcacgtcggtggtggaggctagggcgtcttgttgaggttggaactgaagagtgccgccgagcgttggagaaagaccgcgtcagatgtgtataagagacagggggcgggttgctgcatggcggcgacgttgccaccgttacctataccgaagccaagcgaagcgacgacatagagtcagttcagtcccaaggggaacttgaagccgagatggaggcgaagccggatcaagaaaggaaggatcgaggtggaagtggaagtggaagtcaaacccccgaagtcaactcacctccggtagcttggccagtggtcgattgtccagcccttccgccgttcttgccgaagttggccgcgttcaggttgagcaatccgttcctctgactagtgatggcatcccctccatcagtgttaccggaagctccagtgtaagcgtctcctcccatctgacgctgttgaagcgagtgctgctacgaagcgcaatgacgaacgtcaacgtcggtcatcgatgacacgtggtcgatgatcagaaccaaaggcgaaacaggctttgacttacgaggtcaacgtcttggcttttaagctggaagtcgccaccactcatgcccttgataccgatgtccctttcggcgatggcgccggacaactgctgagaaggagcggcggtaaccgaagtcatggcgatggccaagaggacggaagcgatgatttgcttggtcaacattatgtttatgtttaacgagtgtggttggttgtgggtggtagtgtaaggtatggagtatccaaggaaagtagagcgatgaagatttgtgatgaagagtagagtagagtgaaggtggcgaggaaggagtgaagtgtcccggtcgtcgagaatatatacatttctgggaaagctcaagcggtcgatctatcgaggtttgtttccgcaaagacctggatccgcaagcctcaaaaccttatatgctataaaggaacgaatgaaagaaggtcggcgcgagaaacgcagcggaatccaaaagccatggaacgcctttttccgtatgagccgctcgtttcgaaccggttgtctgtgagtctatgctctgctgacgaatagaaccaagtcacacctgtcgaggcccaagtcattgccaggagcatatcatgtatttaacttggtccgtacaactcgagcgtcgctattaaagcaggtagggtatctatggaaatcttgggaaggtggcaaacaagtcatcaaaggtctatacggtgatgatcgcgtcaaccgttgtacaaatttctcctgctccattcttccgtcgtgagcccctgactggctgctgcactaggcaggtccgctccgtcttccatatcaacttccgggtcacggccgcggtcaaagagcaggtagccatccgcttcgtctgcttcttgggcctccggtgaacgggcgccgcgtcggctggcgttttcgtcgctggcgcctctgccgagtggtggaagattcaggtagtacaaagatccccgcatcgtccggcccatatggagaaccgagttcagagctcgggttgctcgaagcatatagtatgcaggattgcgggggttagaggcctcagggttaatgggctcgttggcaagctccgaagttggatcgtcggtcgtgctttgggatgacctcaggccgttctctataaattacgtggtcatcaatgctcacagtcccttctatcacgaggccccctctctctttacttaccaaaacgtttgaccctccagtaaccaccgatacttgtcaaaaatatgaaccaaccgactgccatgagcatgaaactgaggtactcgttggcctgtccgacctgtctggcagtaggttcctgtaagatctcggccatcgtcatgttcaggttggcatgatcgacctcccaagcctttgcctcttcgggagatttaaatgaggggatctctaccgtgccgtcggaagaccaatgggcgggagtgcggaagcctggtctccagtattgcctcaaggtgtcgacgttttcgaacggatcgttattgagatcggtgtcgtccgagtcttcgtgagggaactggttcgtggagatcatcgtctcggcccgtgtatgaaggtatagcccatattgaatgagggtaatgccgagaccagcgcgagatccgtgttttgccgcgtggcttgtatgtaaaacgtacgtgaggaggaaacctgcaaagtaaagtcaggtcagtcattgcctgtagcgaaatgacctaaatattggctaagacttaccgacaaattgaaaggacaagctgacaagcactggcaacggtggcgaattttcagcagcctggacttcggctaccatagcacacagacactcactgttccaggcgaaaataaagaagtttcccaccggcatgccgtcgatgagtatctcgtctcctgttatcgacgacgtcatcgtacctggcatatggttgacaattgtgagcaagatgaaaaggtacttgatagtcgtctcggacttaccgaaaggtcctgacgagctaggcaagacaacagtggtttcccagtatggaggcacagcgtcccgtagtgcggcctcatatgtcggtgggacatccttgccctccatttccggtacccattctggaccctcggcctcaccctcccgtggcacagcccgaggcagttctggccgcgctgacaggttggcgaaaactccggtatggcccccgccaagagcaggggcctgggcacctctcgtgcgaggatggaagaacgacggtaacagcgatccgatgagctccagcctcgtcgaacgatgggaaggatgtccctgagggtaatccggagctgacgtagggactatcccgttcgaattgttgggtgcagggttcattgtccagtaggggaagaaagggggtggagaggctggtctagcagagggagccggtgtgaggaactagagagtggaagatataaggttaatggataagtgtcaaccagtggaagagatagtggaagagatagtatcgcttacaaaatctcggtcaaaatcgtaactgcccggcatcctgtcggtggtctcgatcggtgcagatcctgggtgttccgccattcttccatctctcagcgggtcgtcgtaaagtccacctgaagcgtccgatctgtgaatctcggctcgatcatgctgggtaggccttctgtcctcctcgtcactgtcatccccgccgatcgtgaactgctgttcctgctgttgtgatccgacatgcttcccccgactgagtaggcctctctgatcggccctcacatcatcgtcatcttcctcgtcactcatgtcaaaggcggcatccatctcccttgcatccggaaagttcgtacgactccttccatcgttgttgctgccatggttcatccgtctcccggcgacgactgatgatgctctccgggagggactcgtgtgaagagacgagttgcgagtgtgggtcggggagccctcgatcggagcatatctggacatctcttgcctaggtgtctcgcacaacagggcgtgaccgaattgctggctgtgttgtttttgatttgatcgagactgtctgcgatcggattcgtcgttgcagcagcagttgtgtgcacccaagggagatcgacttgattcagccgtaagatgctctgatgtaggcgtctgaccgtgaggcgaacggttgattcttgctgctccgcagttgcaaaagggaacaaagacaagggagtgacgcggccgacccaaagaggcgaacgactcgatgtcgtctcaggaatcgtcaaggacgggatgtaccacgagagaataagtctattccttctatcactcgtaatcctgtagtctactattctacaggttggcaagatgcagatatcgaaaacggacgggtcaggtattgcggtggaacgatcgcagctgtttgattgccaagcaagtggataagctagaggagtgcgcccgggcgggcggcggccagacgcgggagtttcggcacagacgtggaacattttattcgagcgatcctatgttctctcattttatacaatcgatgatatactgacatacaccatcgtaaaggtaaatgaggacaaggcattcatatgtcttcccggcgactcggtgaacatcttgatgaacggatttgttgtctagttcagcgtctcactcttgtcggccgcctcctgcgggtaaccactttttgtgttatcgtgtttgtcgtcgttaaagatggcgaaatcgagccggcaatccctcactgcctgcaagcccttttctccaatatcgtcgctagcgatcatctgccttacgtagttaggcgtgccgataacgttggtcgtcaatcgcatcatccttcctgtttttcgattcttgcgaggtcttccttgggcggcatctattgcgtcctcctgctcgagcgtgtcatcaatcgcgaccatagtggatatagcgggaatataggaggtgaagaggacaggggacggtaatagatacgactcgaggggaatgacaggatccaggaaaggaagagtggcgagttggtaattttccctacggccgagcaatttcacagtttcgggcgtcagacttgctaatgccctccagaaccggttagctcaacagactcacctatcccttgccagccttgaaattgatccctctgcatctccctgagcatcgccttggactcctgatatttcccacaccgtctgggcgatctcggtcgaccgagaaaaggcaggcagaattgggagattggaaggaggaagcggtttcctgactaggtgcattccctcctcatcgtctgccgagggcttatacctgtcgatttcgatgtcctgtttcgaggtcgatgggtcagtctagtgaacaaggggaacgggctgtcgcgggatatacctccaaacgtgagcttaggctcaggctcaagtgtgcatccactaacgatcttgcctctgtctgcctttgtgcgtccttccagtgttgggttgccgaggcgacatcgattatttgaggtttggatcggagcgttccgtttggatgtgactttgtacacccaacatccagttgcaattgcatgatgctcatccgcaagtcgatacccttgacctgtcgcagggtcaccggtgctagtggctgttgaaggatcacgtcggtcggatggtcgtagtttgatgcttccaaaagggtgggaagataagcacgtggcaaagagccgcccttttccaggtgaccgatttcctgaaggtaggcttcgatcaggggtgcattcggcggtgagaacagcaaagtacactgcagaggcagtctttcgaacgggatcaagccgagatctgcagaaacgaggatgaggaccggatcagtgaatagcccttgcacgtcaatccttgcagccatcgactcaccactgcatgtcatgacgaccggcctcttcgacccggcgataagctcgacgacctgcggccaaaacccttgatcctcctcgtacaggatatcaacttcttcaaatagtattagagactgtctgatgcctctgcctgccgagctcccgtcagcggctgtatcgaggaacccaaagtttacagattcggcgtcatttgcaccgtcgtctccgtcgatgcccgagttgactgattccagtgtgaacgggttcgtttgcggatcaattgattgcgtgggtacagccaatgacgaactcggtggcaatgatgaggaagcctggggatggtctccattcgcctttgcgaacgcttgaagcagtgcgttccgttttggctcagtcgcgcgggcgggcttgacgtgcaaagtgtcttgacctgcatggccggaacgccctaccatatggtttcgtccgacctctccgaccatagcgctgagctgggcaccgcttctcttggatcccgcattgacttcaaacacctcccagcctaactctgaggcggctgcatacaccgcggccgtcttgccacagccgtgcgggccttgcaaaaggatggaattggcaagccgcgagctgaatgcggggtagatcggcggtccaagggaaatatcaacagcgttcccattttcgtcttccgtagtgcttcctgtggtatccgtcccatccgcgctgaggtaatcgtcaattggatcgagtgcatcatcgacgatccaatcatcctccctgtctttctttctcctcgtcctcttcaccttcctcatgatctttcgtttcttaggagtcacggcggcactcggcttttcacttccgcctggcacgtgcttggcctcttttcctaatgcgagctctttcatccacttggcgaggtatttcgcgggtatctcgttgccgagaacctgcgaagattcggttggcctgtacttgtcgacccaaagacgagtgctgttcggtccggcttgctctttcttcgccttgagcgcctgaaccgctggattctccttgtacgcctgatcatccactatgacaccgttggtggaagtctcctgggatggcatctcaagtgaagaagtagagacatcctctcgtgggtagaggttctgccaaaagctcgtctcggctggtcttccggtttgagagcgtttcctttgccttttcggcatatcgaagcctcccaaccggaagcctcttccagtctctccctttccggactccatcgcatggattgcttgttcgtctctcgtgggtaaccttgcagaacgcatacgagcctctacatccccattcccccacccgggcttgccaaccgctggaagaggtttcggctcgcccagtgcgggctttcgacccataagtatgactctttcgtcaccctcggtcgcctttccttttggattgaagaatgcgtgggccgaacggtccggatgcacagctgctgtccgggtcggtttcgacattgtggaaagaacgtggataatatctgacgattggacgtctggagatccgatttccctatcgctgatcgaattgaccagcgactctgctcgaggggtgacagaggcttcgcgtggcttcgcaccaaaaaatggatggacgtgcttccctgatcccgctgtaagtttcgaaggcgcctgtctcgtcgtcttctctggcgagatggagcgcgatcgttgatgcagaatctcgataccatcgtcatcatcgaaagacgtgtcgaggacgatcgccgagtctgcttcgttcatgctctctagcttgcgtcgtttggctacagccggtctggaggacgttgcttggtccggagaatctggtatgtgtatagccgtgtctatcgagttggtgtgcggtgatgagaccctggaagcggtagcagcggtggatttccgtttagcggtcttgcgacctgattcgtagcattgtcagtcatgatcaaatctcaacaaaggcctcggcttcgaaacaacgggacaaacctcgtgatgactcttcccccttgtcaatttccgaagcgctttcgacacccttattgcctctcgaagccgcagactttggctttggacctggcttcttcggctttgcagcctttgacatggctcgtacttcctgatcctcgtcatccacagcacgtgcctttggtttcctgcctggcttcttcttctggtcgacgacatgcgatggaccgggttcaggcacctctgcgagcatggcttcatcgccctcgacctgcacgtccggctgaattttgacaggcttcaatcccgctcccaacctcgtttgcttgttgtcttcggcggctgcattctttttctgcctaggtgcacgcttctttgaaggctccgatggcccagcgatcgactcagtctctgaagcctgttgccccttgaagaagttgagcaggtttcgagcgggcttcacgacatctgccgtgactcccgggacgtcagagtcgtcgagattagggtcgattccctcaatatcggacatcctagcggtgatctatgcttttagattttgccatgtgatcagcaaggtatcgaggaacactggctggctctcaagtgcggcggaataagcaaatcacgataggtctgaatggtccataagatcgagtctacgagttggcaaagtacgctctgctgctgctgctgctgaaatgatcggacgcgctcgctcctgctcgcgatctcgatcacctcccggcgcagggtcttccggcgatatacatctgtccatatgtgattctcttccagcagctatagatactacaatacatataggacaagcaatcacctccactgggaaatctcgttgcctgcgtgacggttccggaggacgtcgttgatacgcagaccgaaagcacaaaaggctggttgtcagtggaccggtttcatggctgtgagtgacgaatcttatggtgcggattgacaacctcccggggagatatcctgacaagcaataatattatgtcctggtccagctctagcgactattctgcctttcagagccacaaggcccccatggatgagacggaattgccgctcgtgaggcctgcaaacgatagactcggcgagccctcaggcatgcccgtcgtcagatctccattagacagacggagcggaccgacaaagtttaccgtcaacataccagagtcgtaccccccgcagactacatcgacctacccaccaaaacagggcatacagaccaaagcttcaagatggtccacgatagagttcaaggtctatggcgtagtctttgcgattgtcgtcccgctgatgatatggattccaattcgactaagtcaaggtaagccacactttcgtctcttattaccgtttccacctgactggattgcgctcgagcagcctcccatccaaacttccccttctaccaaaatcgcctgtcaaaaggatggctctttgggcgccagatcgcaagtgtctccttttttctatctcaatcgacactgtactgagcactgccaccttgcctgaatgcaggacatctcggatcctcaatatcgatcgttcaggggtaacattccctctcttctgggcctggcagtcgcccacttggcatcatcgcgtgtctacacccacctcgttcgacccttgtacccaagcatggcgcctacaacctttctctgcgccttcaatgtcgtcctgatggcgattctacatgggacgaacgcgatcaaggtgttgtcgatcgtgtttggtaactttttggtttcgagatgggcgacatcgggcaaaagaggcgctcaaggcaaggcgggcatcgcagcgatctggatatataatgtcgccatcatcttcgccaacgactactttgagggataccgctttggagatatttcggaaaggttcgattttatggtgagcggtgatgacattgacggacggtcgtccgacgaaagttgatcgtgcgtgcttccaggacaggtatcaagggctgttgcctaggtggcatattcacttcaatatgacgatgttgagactcatctcgttcggaatggatcgatattgggccgccaagccttcgacgtcacaaacctcggggcagtcgcagacgaaaggtgtcaccagggtaagcagaaacaacggccacgtagaggtcgttggcgatacgcgtttggtaatgacttcgttcgcttcagccaccttccgctcacaaggagcgagtacggacgagcctcccgcatgaagactacagcctgacaaaccttgtcgcatacactctttacccgccactatacatcgcgggaccgatcatgactttcaacgatttcatatggcaggtacgtagagccgactttgcttttgcagggtctttcactaatcgggtgtcgcatacatttagatccgacatccaatccctccagctacaaagaacctcatacattacgccgtacgattcttgtcatgtcttctcacaatggaattcgtcttgcacttcatgtacgtggtggcgataaaagacaccggatcttggggaggagattcgccagcagagcttagcatggtcggattctggaacttaatcgtcgtctggctgaaggtgtgtttcgtcaccataatagggtactttgagtcatgcgctagagatatctgataacttgaccttcgcagctcctcataccctggcgtttctttcgactatgggcgctggcagacggcatggatccccccgagaacatggttcgttgcatggcaaacaactattcttgtaacggattctggcgaagttggcaccgaagctataatctctgggtcgttcggtgagcacatgtccgatcatggcaatatagatgcaaagctgacccaggactatggtcgcaccagctacatctacgtccctcttggaggctcaaaaaacgtcgttctagccacattactggtcttcacattcgtcgctctttggcatgacctttcgttccgtcttttgacatggggttggctcgtaagcctattcatcctacctgaacttgtggctggcaaaatggttccaaaaaataaagtccgtagttcagcttcaacacggtaacttcgcaagctgatcttgtttggccacagtacggtaatacaggctggtatcggcatgttgccgcagtgggagcggtcttgaatgtgctcatgatgatgactgcgaaccttgtcggattcgtcatcggagtggatggagtgcggtatcttgccgaacagctcatatcctcgtctgatggtgagtctatccaagctagcatatgcttataaatggcagcttaggcagggccgattttgctgcgcgactggacaggcgttcaattcaccgtcttttcgtgcgcctgtctgttcgtggcggtacaggtcatgttcgagtaccgtgaaaccgagctgcgacagggcatccagcgtcgatgttgagagacgaatgattagcatgtgtatttgtacatcggatataaggattgacaagatggtgccaaatccggactgcagcctgttcgtcgagggtatcgctgtctaacctttccttgcggtcgccagtcttctaatgcatcttggcgtgtacatcctccttcagagtctgcatgccagcatacgccttgagcatcaaagcgttctcgagactgtatttgccgtggttctgacccgtaggggccgtttccaaaggcttgcctgtagtgcatttcgaaggtttgaagtcagcatatcctgaaacctgaaaacattcggcccatcgctcgacggaccagacaagatgagaccaaggtgatgcttggcttgctcctgatccgacctttgcgagcataggcgcgccagctcgtaatgggtaaagtagggtatccagtggtcgagagtaattttcacgctactactgagcgctgcctggagcgctgcactggacttctggcttgcttcttcaggggtcatactgtatgtcttttcatcgcctggagagatgatggcctcttcgtgctgtaaacacaacaaatcgttgcgatcatcagtttcgtgttcggcagtcccatctcgaaacaagccgcctcaccgggtaggcggcgaaagagtaagcggttcctagcaggaagtgtgccaagcagtagtctgaaggtgggagatcccatgagcgtcatattgcagaccgtgttctctgggcgacttaccgtcccaatagccaactccgccttcatagttctgctcatcgctagccaagacttttacaagctgttcttcgatacgtgggatgactttattgtacaggatacgcggaggcgtgttcggtagctgcgaaagttttatcggtctcagcggaatgccctccgtaatccgatccggctcggcttacagctccaaagaagtatccaagctcgatcgcaggcaacatcaaccggttaccctgcgacacgaatttgcgggctttgcgagaaacgaatttctgatgcgagaagtcccgttcaactcgacccctcagcattgaggctactgcgactcacttcgactggtagcgactttcccgcgattctcttcatattctttggcacctcaagcatgatgttcaaaagggcctcctgctcgtcaaacttctcgtcactggaactgagttcagccagacaggcggcttccgagctgcaggagtgtacccttagatgtgaccactattgatttctagcgcgatactcactacatgtacgtggccttgctccacgaactttcgttggccaaaatcttgaaacaccctcgcgatcgcttgaagtgacacatcatcaagttgttgactcccatgtcccacttgagcaagacttccggctttagcatgtcgacaacggacaagcaggctaaggaaactcacaagacagatatgttgcagcttaaagacgcaagacgcaagacggaagtcagaagacctgatcaacgggtatgcttcaagctcgcttacttggagatactccagtttctgcattaaagcattctggagaacttcgttggctttctctggctgagcctgaagcgtgagaagcctagagtggaaatacatgaagaagattcctggcagatgtacaagccgactcgatcagcactcgcgcttgtcgaaatagaaagtttcagcaccaactcaccattagggaatctgtccatgttgaaattgagcacattctgtgccaggttcacatcaactccggcaacgggcctgatgaacgcctcaaagaggattagccgcacgattatctcgctggctcggatcggtttcgaaactcacatcaagaacgagatcacaaggctgaagatggacccgtatcgattcagtgtcatggtcgtctcgtcagcgaaaacccgacttcgatactcactggaacgtcaggacggccatatcggtgatcggccttcggataccatcctcttcggccgaaatagcgggctcctttcgatccgcggaccaccctccagctgccatcagcgtagctagagccgtctttcggtcacctgcgtatccgagaagttcggccaccttcataaccttgctcggcaataaactgagcatcaaggagctcaatccgctcccaagctgaacaccggatttgaagtgctgatctagcgtagggtcgttgcccgtctcgagataaagctgcagcgttcggtaaataccgtacgctgtcctcatatttaagctgaacatggtcaagtttgtgagtccatggtcccaaattggacggtaaactgcactcacgcctccttgatcaatcctacccagtcacctcccgcaataattccaagtacggccttgatgaggagggattcggcaaagaccaactcggcgtgtttttcgacaagcgtcatagaccgcacatgtgcgatcccgcttcgatccctgacgaacccagcgagacgtccggtcaacgaaccggccggctttctcagactgttcgacagagctgaagtggtcttggcgatttccagagcggccttgaggtcatcggcgtcgaacgtcatcatggctttgatggcctgaatcacggccgaggcgttgccgatgtacatgtgtacaccgtcgggatctgattcctcacacaaggcttcggcttccttcatccgagacgtcaagaacaagtggatgatctgcttgcatttctgaatgtcaggttgtaggacagcgttctggtcgagatcggtataagctgaaggattgtgcgcttgcacccggggcccggtgttcacatcgggtttcgattcgaccacagccctctcgatgacggccgagctcgattgcctcgtcagatcgtgagcagacgaggcggatacccctcgactgtgtgtaggaggttctggaacgaaggctggcaatgcgctcgggttcggcgccgtctgcatacttgagcgcgtcaccgcagccggtcgtgggatgtcttcgtcctcatcctcttcttctacttcgctgagaccttcggcaggagtgccgtagacttcgccatcactatcactctcatcggcatcaaagtcgtaactccattgactatacaccgagtccgatcgattccgcgacttcggtgccttgctcggagagccgccatcggtagataaatggttgatgggagatgaagtcatcgagttggttctagagatcgcttcgggctccgtggtcaagggcgacaggctgatgaccggaataggaggcgcaagaccttccttgggcggactcgtcgccaaagtcatgttctgtagcttggcctcgaccgcagtgggcgaaactccttctcgggaggaatcgccgttgacgaccgagacttctctgcgttcgacaggcgtcttggctcctatcttggtgggcgttccgagtccactcgatggagcgggagggggccgatggctagacagcttggcgctgtttgcaactgagttatccaccgacgccagggacgatcgatcgtccaggcttgcgacagaggattcgcggcccctgatgctcgagctggagcttttgaacatcgatgataatcggcgtttcgggccggaccttggaacgacgtcaaaccagtcaatattcgctcgaggtacgcaaaccgaacatatgagcggcctacccttttcgagtctcggtctcaccgtctgcggcctcagcaccagtattggatccgttcgaagtccttctcttgttcccaaacctcattgagagggacttggacattttccgctcggtcgtcccactcgttgaagaatcgtcatccggggtcgctccctttccgaggccttgttgctggaccgaaacggtcgacgtggatcgacggaacaacttggacatttcgacaggcaaagatccaagtttcgagctgtcgtctcgattctgttacgctcgtcgagccggcctttcttaacctcgaagacaaattatcgttgagaaggacgacctcgaaggagcaggtgggtgggtgggtgtgtatcgtccgatctgccccttgtgctaatttgaatccggccggcgcgcgtcgtcggaagctaatttccataaatcagggaaagcgatgactaacggtccgtgagatgacgacgatgagatgatctcgaaacttgaaagcggcaagtcgcaacggagatcgacgaatcacctggtgataaagtttgattgggtacagctttggtctatacattaacgaattcgagatgtcatttgacgccccgtttatcggaaatacagaggaatgccataggcgaccggtgccgcccccgttagatacttcaacttgcagcattccctagccttgctcagagcctgagcgttcgagaccgcagcgtcgggaagttcggtgtaacccgcttggatctcttcgatatgactctcgtccatcctgagttgagatgatgtggattgggcgatcttgtcgatctcggcgtcggtcacatcccatagaacggccgtgagcgaaggtctgcgcgcagcaaagtcgcgaatgagccatcatgttgcaggcgcagtggaagtagggtatctactcacgctccgccaaccatatagttgtagggcgtcccaattcgatcaagatcaccttgatccttcattagaccggacgagcacccccaaatcatgacagatgcgcatttcggcatctcccggatcgctctcgaagagatatactgctccatcccgccgtgcccgaaatacctgaatgacaagagcgagtcaatatagagcgcaagattgattccggacattggaccggactcacaggaccagctcgtagttttgcagagccgacttgatctccagactggtcggctctcgaccgatgatccccttccagccgcaatgctgcaccataccttccagccaaggcccaaacgtttgctgagtcttggaaagatcaccactcgggttgaggatgaaaaaggtcttttgcggatggacacttttacgcatccgatccgggtcaatctcggcgcccggcatcggtttgggcagtcgatccaccaagaacgctaaggacggtactcgactgatggccctgccgcggaggatcgggatcgactcccacgggatctcctgcacgttccggtcgagaatgaggaagatgtgttcgtccgtcactggggagatcgattcggtccttctgctctgttcgaaattgtggagggcgttttgcacgtccatcgagagctatcgagacatgtgagaccggtcagcctcgaacgtcttgtccgcttgcttgacaagacgcacctgttcgatatcaatctcggccaatgccacgccgatcccgttgaactgatgaagatccaagatgaaatagaccaggtcttcgaattcctgatctttcgatttggaagaaagcgttgagaagcattccacaatattgtcatccaactggatcctcgaccgtttggacttgtcaccgtggttcaatgcgcgagcaaaggtatcctccagtgttttgcgaaaggtggcgagcgctttgggagatctcccgctagcaggattgaatacggtctaagacgaaacagggaatagcccgtgagcggtagtcggcgaaaaacatctgcgaaattccgaatgctcaccttgaaggcgcccaaccagcagaattcgatcgtatccaggagctctttcaacctctggtctagcaccttacgctgggcccaccattgcgtctttgcagtcctgtcagtgcgatcgacatccttggcgttgcgcgcgctagcgtcgctgtccgcaatgatttggcgcagttccgtcaatgcggtttccaaggtgaaacattcgtcttcctcttccctcttgccttgacgatcaagtggcaaggtgaaaatgacgggtggtcgatttcgctgtcgtcgcgagacgaacatggtcgtctgatcatcggtcacgttcaccgagatggcgcaccaattggtcggcatacttgacaagtcgggctcgtcgaacatggtcggcggcgttgtagctccgaggggcggatcgttgtgcgcagcatcagaatcaacctcatccaagtcgatgtcaagaggcaaatttggaaggcttgctggaccaggtacctcagcagaccatacaatctcgtcggtccggtcgtcccggttgcgattcgttgcaatctccaagagctctcgccgcaaggtgatggaacagctagagtctgcttgcgactgtcagcgactattgcagggcttacagacggaattcagacataccgagcagggaagctgcgcctcgagtatattgaacagagttccgtccaagggacgcttgataggctcgcaacatggcgatagtgaccgtcgcttcgcggacgtcgctaacgttgccagcattgcctctcagcgagatgtacgactggaaagccgattcagcgtcctccaatgtggcggcgatggcgtttcggctttgtgcaatgtcttcgtctacatcgtttactgtaccgaccggcatcgagatcgctgcgaggtgcacatgatgcttagtgtcggtgcctcgccttttactatcggtgcctatcctcactagattcggtcatcgagttgaggaacaggtccgccttgaagcggttaagcgctgctgaaaatgtcgttgtgccgataatgtgcagctcatccgccccaaacattgctccctgctggatgttacgagcctgttcaagcaattcgttgctttcctctatgcggtcgattcgacgcaacaggcgggctagtgcgagtgtaaaatcagtaaacgtgcgggactatcgcaacttgtgatccttaccttgctgaatgagcactctggtacgtgtagcggccaagagggtgttacctgtgtcgaccaaatttccacgtttcgtgggcgtgtctgtagctttcacaggactaaagcgggaagaagcgtgagcccagcctcgagtatgagaaagtcacgacaaggttgtacatacgttcctgccagatggtccgacgtggcgaacgagccttcgagcctgagcaatacttgcttcgtagcttcgaaagcctgctccgccgcttcgatcatctcagaatcttcttcggtagtaatctgtcgcgactgcaattccgctagtattcgatgcgcttctgccgattctgggccaccaagctgcatgttttgcgtcaaaattagcaccgtacgaatcggacgttgcctgacgatagcactcacctcagacaagacctgcgctgactgctccacactggatgccgcttcttcgtattgtcgcaaagcaatgtggacctccgctgcagcacaagccaccttggcagaccagtacggagagcccgtcacgtctgccaaattcttcgcttcattgacgaagttcaaggcatctctagcggagcctcggaagagcaggtctccggcgagctgaagagaactagtgagcaatgcctgtcacagaaaagcggtcaaaatcgcgtctcccattcaaaccggtcggtatcactcacgccgatcaagctcaggtgtttcccaatcaattgttttccggtgaagtgagacggtttggaatccttgttgatgtcatcaacagctggggcgtcttccggcttggtatgctgcaacggtggaccgaacggatcctcttgaactgccgtaagtgtttcgaccgcagacacggctttaggggcgattcgcgccagattctccgccgcccggctcagcaagcggaacgctactgaccggtgtcgaattgtcgcaaccgcattatcttgtatgtgagcaatctctgccaagacgaggttggctaaagccgatctctccaaggtagcacatctttgtcgaatcttggcagtcgaagaacctcccttttgtacagtctcgggttgagacagcctacgaatctcacagtacagttcgccgctacgttttggcggtgaatcagcggtgtaacagcgaatccgtctcacagaattcttaccttttggccgtgttactgatagctgctaggtacagcgcgtagcgaagctcgaaatcgactcgttgctcgattgagagagcgctcgaagacgatcttgttgccatgctgcgagcgctcgcaaaaatcgtgcccgctctgttcaactttcctagccttgcatattccgtggcgaggcggacggagctaatcaggaagtctttgttgattggcagctggtgtcaggattggcgcaatttttcgcagcctataaagcctcaccacttagcagagtcggatcgtcccgttctaggcccctcttgatcctaaggaattcgatctggacgagagcgtgactctgcatgctgagtaggccgatgaatttgtctgtacaagatgacggtgtgaatatcggtgcctgacgtggatggtaccttgggctcaccgagacgattgcaaaggctgacacggtcatcgatagctgggagaggcggttctggcggatgatgcaatcgttcagttggtgaaagcaggatgcattcgccaattgcccccggctcaccttcttgtatcagcttggcgccagatctagcggtcgcctttcttgcaacaggcgatagatgcaatcgtttcttgtctactagaccgatgagacattgccgagcagcagtcgcgtgctccttcaaaaggcctagcaagtccgggttgcgtgcagcgtaggcacccgtagccactagcatatgaagctctgcctcgtactggctcttatatactacgagagacagatcgttgccaatgtcctgagcaggtggcacggtaacctttcagctagattgtcacctccaagggaggactgtacttacacccttcagcaagtcgaatatgcgcgcgaccagtctatccgcgctcggttgaggtgttccgaccgatagacagtgatccaataatcgcagagtgcatctaagaaattcacgacctatcagtggaccaatgcaaaagggagacttgtcctcgggctgacctgatttctcggatcggattacccagagatcgatagaccgatatcgtcttttgcagcaacgcctgcattaaattcgctacttctgggcgatactcgacgtgttgcatacatgtcacgagatgttcagccatcgcagctgatgcggacggagagtcgccatcgccgaaaaacttgtcttcaaatcgctcttctacgtttgaaaagaagaggccctccccgatcaagacggacgcgagtcgagccaagaccgctgatagcttgttgttcgacgagaacagggcaaaaggtggacgagataccgcatccgtttcgatctgtttcaaaactaccgactgcgcttgaatacatcgtattcgcgcgtctagactgtcaactttcttgcccgctctcatgtagcataccgacaaggcctcccatcgcggtgacatgatcgttttcaaagcatcccaatccctctcattctcgtaaggagcggattgaccggtttggtacacatccagcgcatgacttccgagttcgactgccatttgaatgaagggtgtggccggaacgaaaagctcgagtcgatagacccctgctccgcaagaccaagccgcattggaaagacaccgggcccaatccagcaagtcggaggcctgagcacggctagtgcggaatagccgctcggaccgctgcaaaaggtccaaggacttggcccgactatcctgctgtgcaggcaccaacgccgacttgctaagagacatggcggtgtcgatcgcgattgccgtcagatcagcgtggcgttcgtggaattcaaactgcgcgcatggcccgtgaagcacactctcgaccatgtcaaacgcgcctgccagccagctattggcgcctttgatgagcgcgggtgataccgagtttccctgcttggcaaggtcgatgaccttgacgagtcgggatcgcacccggtcgactgccctagaaaccttgcctagtacgtatagaaattcttcttcaggcagtccctcgcatgctggcttgacggtccctagtgatcgcgcatcttctagcaggcgaccgatctcgctcgcaatgtcggtcaaatccggctggtcgagcaagacgacaagcttggctaatttcccacagacgacagagatcgagctggaaccagaatctccgtccagattgagcttggcgataccttcgtccagcatgtttgtagagtctgctgctggaatcggcacgacttgaaggtaggtaacggctttttccatgccctcggaatctccgagctatagcacaaagccattagttggaggggctcgtcccacgaatgcgagggcaccaacgtactgcacggtaaagtccgatccacaagtccatcagtccttcccactctttaccggcctgccactggctcttgtcgccttttcgctcatcttccactacgaaccgaatcacgtcgtcgatgacagcgcagatcttccttgccattgtcaattcaacgtccccgcgatctgtcgcctcgttttcggtcgtcgtgatggcttgtcttgccagtctctcggcctcgcgacggatctgcgcccacagactcggcagcgagaccttgccgttcggcgaagccgtaccggcgcatacgagcagcagtaaatgactcgtgtcggcgtccaggccagtaccggcgacacatggagtcgaggccaagagtttcccgatcctgctgtacagcatcatcaagtagtttctcgtgacatccatatcgaggctacgagtcatatccagcgggcttatgccagatgacgccgttttgcccttgaacgcagaaaacgtctgcaaaaccagtctcgtctcctcctctgacgtcccatgtagagccttattagtgaacgatagccaaagcatggattgccaactaaagacagccatcccggctcgaggatccaagtcttcgagattccggcttccacgcggcaagaagacaatgtcgtcaggctcatcggaagattccaagctgttcgcctcgtgacctagcaagaccattactagcggccgagtctcgaccatgagcttgacagtagacgaatgctgttccgacatagaacaaggttccatcagtgctgcgcagagccgtctcgctcatgctcgtctgactcaccagaccgaaatccgaccaagctttggcgatctgcattctaagctgaatcgcggcgacagcctcggtggtccacacagacgaagacgcttcgctcttcgctaacagatctcccgtcaagcctcgcaatccagcggaacattcgtcgatgaccgccttgattgtgacgtccgtccactgcttgtccccagagtcgcttttgggttctttccggctgtgcgagatcgtgcgtttcgtggtgacagcgggtatctcgtaacgatatccctcgacctgagccgacttgaacgacgcgatgcacttgttgatcgacatcttgatttgctgcatctcggaaggctccaatgcgcgaggtgagatgcacaaggatgtactcggcgggatcatacggatacgggccgagttgttggtagtcgtggatgaggaggtcgtagtgcgagcgtgtcggccgatgtccatcgaaggcttgctaggctcaacttgagcgagtctactcgtggttcgagatccgttggcaggggtcgaactggagctcttgtcggcagagtcggtcgtcctggttctcgtccgcgaagtgggggcgttggctagtgaggacgatactgtcgagccagatgcgacccgcgttcggtgcgttgcaggttgtgggacatacactgcaacccttgtcgtgggtcttatacgagaagctggtgcgtttcctgttccaaccttgagattgtcctgcaaagctgcagccagttcgtccacctcgtcttccttctttgctgtcgccgaggctgtccgcgaagctattcgagtcgtccgggttgcggtcgcggttacaggtctccttgcagtttccccactcccattaagcgccgctctccgagcaggaactgcggctctctctttgagcgaggtcatccgggtagccgtgggagctgtagatgaggccttggtcggggattcgtcgatggcttcttccacccgtttgcgtgttcgagttggaggagccggggccatcatcttggcagagttagcggtactagacacttgagatgtcgagttggtgggtttgacaagtgtgcccacttgcgctctcgatctcgtagtcctggtcgccatcggtagtactggtgctgcatctgcggtcgcggacgaatccgacgtcgtggtacgggagcgtgacatgtcgagctgtccccaaagtcggccttgtgagatcctcctagatcatggatcgatctgaagttcccgatgtcgatttgattggttgatagtcgcttaaaggctcgtgagcggttatatcctctggctcataccccaccttgaccctatactacaacttcgagctgaatcgtcacaaagccgagttttgtttacaattgaatattgtaataacgcataaattgcctattctatgcgttttcacctaatttatccaagtgtaaacaaaaactcggcttctcggcatcggcatcatcaccatctactcatgcagctcatcagatagatcagatacagttagatcatgaaaccaccttgcagcttgcagactgaaatgtcagaaacttggacagccgatcgaatccgagtaactggttactaggcgatcaaattcacctccccaacctcctcgagccaccgttactttgaatcggctaacctcaggaatgccaccactcaagccgttcgctcgaaccgattttaggggtccggccacccctaacaggtcttcaacagatggctccaggtcctcagctccccacggtcgatccgcgctctcgaccaatgtcgtgaccgtggatggtacgggatcgccaatggtatctagctcgtcatctcgacacctacccacgatgctggaacagccttctagtcaagagggaactcctgtcaaggccaagtcacgtaatttcgggatctcctcgtcaaagtcgatccccaatatccgactgcacgcagatacgccgtctccaaatttggtctccacctcgacttcgacagatgtccatacgcccgtcaatcaaatccgaaccaggtcccgccaatcactggcaggaactccgctacgtgagaatggtcattatacgccttactactcgccctcgaccccatcgcaattctcgcggtcgaccatcctgcctttcgatagggagagcaatcgacacgatgccgaagaggctatcagacagagcgccaagaagccttctcccgacgagattgaccggaaagccacgccgcctgtcgaggcaggttggaaaagaggattgttgaactttggacgaaagtcgagcgaggacgtcgtgtcgcgcacaaacgtcaaacggaaaggaatcgtacggaaagccaaattgacggataggtgagtgtcgggtcgtcgtcaccgatgtacggcaaggagtactgatacgctccgttatccttgacaggctcatggcttaccctcggtatgcatacgacgagctgcgcgaatacatcgacgatctctctctccctccccacgtggcaccctacctttcccttcttctacacactctccatttcttgatccgtgcgccgctgtggcagatcttcctctccctcctgcctctgggacgacaacgtcgttggaaacaacaaccgacagatagcgtgttcgtacagcctgactctgggctgaagcggtatgaccagatggtcgaagcggggaagcaaggttggcggatcttcggatggttaggtcttgggtcgacgagtgtgtggggagcgttgggtgtgggtcctccgtccggctgttgtcgccgaggtactggtcgctgatcagcatctctatcgatgaataacagaactggttgttcttcctggtcgtctttggcatatctctggccaacgcgtcgtacctcttcaactcgaggcgacgttatgacatgcggtttcgtaacgtgagtcgagtcgtccggaccatggctcgcatgagtcaaaaccaaaagagagagaggctgagttgaccctgctcagacccaactcaattcgcccaacgcgcggagcgtccccgtacccaattctcgtgatctcgacatggacgacgaggacagtagtctctggacgggcaagagggtcctctcgcttatctggttagtagcgcatgatatggttcagtaaagcttagaatgtggccgctttactgatgagccatccatccacctccagggcatacatcaaccctttgacgatggtcaggatcatgatcggcaaaccgccccatatcaaacgggaagaggagaaacgagcgcaagaaatgatgcagagtctgaccgtgtgggatccgcccgaattcaacatgatacttttcatgtaggtcgtcagctcggtcctcaaacgagtgagaacaaggatcgcacgctccatcgattctgacagccttgacgtcgcagttactattcccccatccaaccggtcctcttccagctcatcggctactcgcaccccatcatcgctctcatttgcaacgccagcatcaccgcgcagaccatctttgtcgtcaaagagtttgagcgactgctcaaggatcggcagattttacagcgcgaggtcatgagagagtatgaccaggtgtttgtttacaagcagctgttcaagaccaaaaaggacgcgagcacgcagacgaacgagggtaggtcgtcattgttacgagtgggtgatgccgtcgagctgatcggacgtgtctttgatcgtcattacagccgaattcctcttttgagcgggtcgtggggttgtaacattaggcctgtcgcattgcatagtatgactgtccagccattgcaggaatagtccctagaggatcgagttgcgtcggtttcggatccacagacgatcccatctcctgttcgttccccattcaatacttctgttcgatttagggtcgagtcatcggcttgcaaacgaacaagaatcacgcagggaaaccgacggaagtttgcattgtcgacgtccgaaaggcattcggtgcgggaccttctggggcgttgtgtgccaagacgagagccaaaagtatgcacatagattgtaattgaaaacgtgtgactgacttggacactcgctctcataggttggcggcaagctggcagaggaggaccaatggagcggttgtctgattttggagatcaaatctggagtttgtcataatatatttgttttgttgggtccaacttcatggtggtcccgctggtctaggggttatgatcctcccttagggttatcgcaactcaattgggaggggtgcagtgttcgagtcactggtgggacctttctttttgccctacttgcgcgtatttttattcatccgatcacttcaaggccgtctttgacgattcactgcagcaacctttcacgccaactgcactggcactcgatacgaatttttagaactagaggggtgtttttagggtgggaggttccatcggagtgttccaccggagaagcaagcgggagagagggaaacgtaggctttaccgccgcggcgcgggtgcgcagtgtacaagtcactggtgggacccgtctttttactttccacaagtactttctttgacgtcggtgtgcagtgttcaagtcacccgtcggaccttttcctcttgtcctttatgcttgaatcttctgtctcgaccagatagtgtgcgtgacattcgaggagatctagaatgggaaacccgtttcgatatcggtcttgctatgtcgggttaaatgacgatcgagatgcaatcggcagtatcgcggaaacgatcttgaccctactttgccacgatcgctgatcagtgcgtacgggtcccttcgactcgatttaaatgcaatctcgaagccgatcacggcccattagcaagctcaagagagaccctgtctcgatctcaaagaacagtgagggacatcaaagcgacgaatcgcgcatttcgcatgatgcgcttgcgcgtgttctcatttctatatgactggtcagcatgcagcatggcgacgccctacaacgcggcggctccgcacccgcagaggaggcgtcggttctgcgctggcattgaataaggatgatttgaagtatcacttgtcatggggagacgcaggaggttcgacttcggcaatgtagtttcaatggcattgaaagacactggggcgcatctctgtgccgaccgctcagatgcctatcttgcagcgttcagtaagcagagctttcagtggtgatcatcgagcttggttggattcagtcttgtgacgtctttgaaattttcccgataggacgtttgtctacctgaaccaagcctggcgtggagcttggatacgataccagaggttgcaaggagcgactgcggttccatactttccgcaggaagtcgtagcagattccgtaacccatttgccgacaaggccgacaagtcttccttggtgtagccctcccaccctgccaatgccaatgccgaccggcgatgtctgcagctgaaaatcgatcttactgcaggtgtacacgacgaacccgagaaacgatccgtgctcgtattaagttctggctgcgtcgatatctccataggggtactgttacaaatcaacgctcaagcgggcctcccacctgcttgacaacgctttcccatcagacttccacctaatgatggctgtcatccccgtgaccgtggccatgaccgtcccaggggtgcttgagaccctatgcgtgacgagcccgtccataccgtattcgatggcgagatgggtacgagtgatagacatcggtcagattcgttgcgaacggaggaagcccgtatgacagggaaacgaaggatcaagaagacaggacatagtcagtagcatgatctctttggcacggcgaacggtgagaaggatagactgaccaggagagcggcaccatcttgcctaagagtcaaggaaacgaggctcatcagtatgagtgcacgtggaagatatggcttgctatacggctatcggtctcaccttgctcggtagaagataaagaaccacatgccggctccgagccccttggcgaggaacctatgtccaaatgatggggggtgggggtggaatcctgtagacgcagggagagatcacccacaaggtcagcacggatcagccttctcctccaagcgtatcgttcgatgggtataccaacctggtccggccattcttgtagttttcacggtgctttgatacgagtgccctgggttgttacgatcggtgttgtcaatggcactgatctcgatcatgtcaaccttcttgtgctcggttgaacgaccaacctcgggatcccagactagccagactgtttagcccagccgagcggacatgaccaagtctagtattcacgaccagtcgaaatgatgacatgtccgcgggtcagcttgctcactctcgtcatcttacggcatcggtctcgccaaccgacctccactctcgaaacctctagaaccgtcgtgctccccccactctcctctacgatcagcgtcgtcgggaatatgatcaacttggagagctagaggcaacgttcagtatcattctatcttttcttcaacctgactccaacttccatctgcaacttgtcagtctcgtcaccttccaagtagctctaatacccgcatcagaaattctcagacgataaaatggccgacgtgagttttctgactctcgcgtgacggttagccgggactctctgaccgtttcttctttcgaacaccgcttacaggctgctgctcttaaagctgaagccaacgctgctttcgctgccaaagactttgccaaggcgtctgacctgtactcccaggttagttgcccattgacgcggtccaatcgtcatatcgcgatttgtgctgaaagcttcatctactggatacaggccatcgccgtcgatgggagcaaccacgtattgtattcgaaccgatctgccagcaaggcttctttgaaagactttgctggtgccttggaggatgccgaaaaggtgcgtcgaccgcatgagcgatgcgcacgtaatcaagaccatgagcttatacgagtccgctcgagcagtgtatcgagctcaatggcggattcgtcaagggttacgcccgaaagggagctgccctccacggactagcacgatacgaagatgccgtctttgcctagtaagtgaatgcaaaccagctcgctctcctctgcatctgcttacattctgcgtaccggcttcagcgaccagggtcttgagaaagaacccaccaacgccgccctcaagtcgggtctcgagtccgtcaagaaggccatggactcgaacagtccattcggagcgggcgagaaccccatggcgagcatgttctctgatcctaacctgctcggcaagctcgccagcaaccccaggaccagcaaattcatggccgacccgtcctttgtccagaagatcaaagatctccagagtggcaagagccaggcggacatggccaacattctccaggatcaaaggatgttggctgttctcggagtcgcgatgggcgtcgatatggtcagtctcacaggtagcatctgggtcgtcgtgtacggtcttgctgatattaccaaccttttcctgactatagcaagctttcgagcgtccggaaggctcaaatgagatgcccgagggtctcaaaaaggagttgaacgaggataccgatatgcccgacgcgcaaccttcccaggcgtcagatgcctctggctcggctccccgaagatcggctacggtcgaggacgagcctgagccctcgaagccttctgctagcaagcctgctgcgtcgaaacccaagcccaaggcacctgagcccgctgccgagcctatggaagtcgagccgaccgaggatgacctaaagaagaagaaggctgccgagctcaaggcagagggtaccgcagcttacaaggcacgagactttgactctgccatcaaagcgttccagtctgcttgggacgagtcaccttccgacatcaccttcctgaccaacctggccgcagtgtactttgagcaaggagactacgaaaagtgtatcgaggcttgcgacaaggccgtcgaggaaggacgatccatgcgagccgactacaagatcattgccaaggcaatggcacgtatcggatccgcctaccaaaagcaaggcaatctcgaattagccgtcaaaaactacggaaaggctctcactgagcacaggacgcccgacgtgttgaccaagcttcgtaatgcggagaaggccaaggccgacgccgaaaagcaagcatacatcaaccccgagctggcagaacaggcccgagaggccggtaacgtgcagttcaaggcgggtcaattcgccgacgccgtcaagtcgtataccgaggccatcaagcgccttccatccgacccccgcggatacaacaaccgagccgccgcttacaacaagctggcagcgctacccgaagcgctcaaggacgccgaagaagccgtcaagatcgacccgacctttgtcaaggcctacctgcggcaatccactgtcttgttgggcatgaaggagcccacgaaagctatggaggcttgtcaagccgtaagtattggtttagcgttggtgactctttatctcgctcatcacactcgtctccttgcataggcctcggaagccgacagcgagaagaagcatacccgggaaattgaggcccagatgatgaagtgtgccaacgagacgtatcaacaacgacagggcgagaccgacgagcaggctctggagcgagcgatgcgggatcccgaggtcgccaagatcatggtgagttgttatccgtaacatgtcctaccgataaggtattgacacttctgcacggctgtgaatgcgacgttagaacgatcctatcatgcagtctatcttgcagcaaagccagaacgaccccaaggctttgcaggatcacatgaagaaccccatgatcaaggcaaagattcagaaggtgtgtaaccggaagacaagagtgcatcgatccgggcatcgctgactttctcacatccctctgtgttctcagctcattgccgctggtatcattcgaaccaggtaaatttgggcttcatgatattcttggtctcgttcgatgcattgtcaagttttagcggcatatattaaggatcgtaacatgaacgatgtcgtaatcttttgttcggcgcagtctcgtttccacgtcgaagatgatgacgcactccaagcccgcacattcgtacggccgcgttgatcgctcctcttgaaaactgtgacatctcggcgtcaggctgatgactcgcgctgtgtggagcccgataggcaaggaccctccggtgactcgatatggcgagacgaaaccgacggaagtgccttttcaagattggatgccaatgttgcatcacgcttgattgctggccacggccagatcctcgtggtcgcagatcgctgatccaaggttctttatcaagcccggctcgtcgtgttatgtccacgttcacttgggcctttgtaggaggacgaaaggtggaggcttttcccttgcctgacctgctgatttgacttgagatgggccgtttgacttgccgttagccttgccagcacctttgttcgactgacgcggcaatacactgatcggctgattaggatctggacggagtagcttgattccgtccttgtccatcttggcgggtgcgcggccgtggccgccaggagacaatcggacgtcctggcctctgggtcgggccaacaaggagatgggtgccccgcccggcgctcgaacggtcgacccgttggcagtctgatcctctagcccgcgtctctgttcattctggattcgatgcatctcgctgttttcccgacgtttcgcagcctcttccatctcttgcgcttcgaggagcgcctgactgcgttctagagcttccttagtgagtccgcctcgaagagcaggcgaggtgggttgagatggtgcgtgttgctgctgctgtggcgaggatagaagggccggtggccgagtcccaatggctgcatgctcgggtcggagcagacggatcggttgaggagcctgtgcagcgataccgagtgggcgtgtggcggccataccggggatttgcccttcatgcgaagctttggcacccggtggactgcgcttcaacaacgtcgttttactctcgttccgaccggtattttccctccctgatgcattcccgcctttcagctgtctcgattgaccgcctcccgcatttggcgggggcggtgctgtaaaatcgagacatccgatccccatgatctcggcccattgtctgatagcatggccgcgagctcgatcgccgaatctgatgatatgcggctctccctcttcattctctcgtctgtccgccgcctgcgccgggtcgagcgtctcggggcagacgacgagaatcggggcgtcttcggcgagttcccagatgtgtcggaaaaaggaagcgcattgcagtgtcgaagcgacataggtcggcatcccttcgtcacgctcttgacaatcgtcaccgcctcgatcttgatcctgaccgagctcgcccccgtccgccctgatctcggccaagggttcccacccgaggttgttgtccgtctccatctcgtcctggatccacaatccctgtctgtactgccccggctcgaactcgtccaagtctccttgctgacgagcttgatggcgcgtcttttcctgtgcgtcttcgatgaaccgggtagcctgacgagccttgacgctgagggggtgcatggactttttgagcaagtctagcgtgttgagtgctgaaaaaggtcgattccgaacgtcgagtgaggggtcgtcagccacgtatgagctcgagatgtatggggtgacggtaagactcaccttcgagaggtatgaccaactcggcctggttcttgatgagattgcgtatccggggaagggcgaacaagagcgccgaagtatccaggacgacccgtcgaggctgttgagcggcagtcctctcccgatcatgtcctcctccggatcctccatgtctcccctgaccatcttgacctattctcccgccgccgccaccaccgccccgtccgtgttgaccgttcccgcgatgaccaccaccaccctgtcccttatacacatctgacgctgccgacggaatagacttacgctacacgctccttggtacctcctcgtttccagacccacattattgcgagagatattcgtagttgagttgataggggggtctcgagaaggggagatcgagtgatcgatacttttcttgtctcttgcgagaggcaaaggctttattgattctggacgagtgatggctcgtcaagaggggaagagtttactgtgaccagcaagaagagttgagagctgggaatgagacaaagtgtgactgtgagaatgtgtttgggattgggaggtgattgtgagggggggtggggttgttgtagagcgaggaccgaaggagggaaagagggggggatggatggatgactttatgaggagacgcgtttgtctacctgggtcgcggtcgagagagagatcgagaagagagagacgcgtcgcgcgtcgctaaagtgctccctctctctctcatgcctctctcttcaacctttctatcgctttctcacgcgtacatttagttcaatttgtttacgatttgtcattgaactgaatagagttgatcatcaaagcgcgacgtacgcgacgcgacgcgatcgagcgagcaaggcaggtggggcgatcgatctcgattactactattttgtgcgcccggctgatgacgtcgaggctggaacgaaacaccccgctctggatcgaggagggttttaggctcatgcccttacgcctgtaggaactgcaagcccacatctgagcgtatacagaagacctccgggcatgactcgcccgatcgtcatctgcatgcagattctacacaccggctgatatcgtgtaagagccactcgcttgtcgcaagcctcggccatcgtccacaactctgcgttcgaggtcacattcaacgagatcggccatgtgcaatacaatgtatatataattccatcttctcttttctcgattcacatgacgacgtatcgtacaaaatgtataccatcgacccccttcgatccacctgcgattagtctgatttctatccgttccgcctcgatttactgctcattgacgaacacggcggccatacccataccggatctaacgaatcggagacatgcgaggtcagtccctcgctcggttcgaaaagacgccttcggatcatgatcaaggagactcacccgatacacatgctcgtcacgatgatcttgctgcctgatcgcttggcttcggccatggcggtagcgatctgtcgagcaccggtagctcccaatgggtgactgcgaccgcatcctcgatcagccagcatgctccacttccgctcgcccggagacagcctgacgaggcgggactcacccgaaagcgatggctcctcctacagggttgaccttttcataaggcaacccgatgtgctggatgctcatcacggcctgactggcaaaggcttcgttgatctcgtacaggtccacgtcctccttggtgatcccggccttgctgaggaccttgggaatggcgaaagcgggaccgacacccatgatcttgggcggtactggcgagtttcaagcgagcgctttaagtcggcaggaacaatggcagcgattcagggtatgtgccccagcgagactcacctccgacgacggccgagatgacgaatttcccgaggatggggagtccgagctgtttggcgaccgagcgcctggcgagcaggaccgcggcggcaccgtccgacacttgggacgcgttaccagcgtgggtcgccccgtccttcttgaaagcgggtttgatcttgctcaaggactgggcggtgacaccgtcacggataccatcgtcagtgtcgacgatcatctccttttcctcgcccgtcttggggtcgatgaccttgacctgtattagttgtccccagcggatttgcatcagcactcgaactgcaactgataccgtacgcgtgcgactcgccttgacggggacaatctcgctcctaaacttgccatccttttgagccttcaaagccttggcgtacgaattggcggcaaaggtgtcctgaacgtctcgcgaaatgttgtactgctcggccacgttctccgaggtcattcccatggggatcagacagtcggcagcctcttgacaggagagaaccttttcagacatcttttctggcatcacgccggagccccaacccatgctcatcgattcgacaccggcaccttgaggatgatacaaagtcagaatcggagtcgcgcgtggtcgacgacgggaacgtatcggcttaccgataccaatgtcgatctcgccggccttgatctcgtttgcgatctgaaaggttcaccaagtacgtcagcggtgtcacccgacctgcccgtttgtcacgacctctcccttacctgcacgacagcggtcaacccagaggaacattgtcggttcaaggtgttgatcgaagtgctgaacaacgttgcttcgtgtcagtccaccggtcggtgtaatgtgtaaaagtccatctctgggcttacgtgttggggattccggcataaagggaggccattcgggccacgctggcaccgccaccgggggggaggacgtttccgaccgcaatgtccctgaaatgcagatcaatcgtgcatgcatgaggtaatcagtacaggagtcactgtcgaggcacaggaagaaccgttcgccactgactcgatcttggaagggtcgagcttggctcgggtgtaagcttctcggaggacggcggcgaggagttcttcagggcaggtatccttgaaaccacccttcttggcctagaggagaacacgccgtgtcagcacgaatgtacaaagattgagaaccgaagttgggctcgagactcaccttggtcagagcagttcgaacagagctacagatcacgacatcgtcgttcgagttgagcaagagcttggccttgccgagcgaagggatgaccgaggtgatggtttggagtgcagaggccattgtatagagatttggagattcaggtatgaaggctgtacttgcggtgattgtgaggacgtagtggagttgaagagaacgggaagattgtatggtaaagtgtcgttgtatatacctcgcggttggtttgcgtggattgataaagggtccaaagaggtcacgcaccaccacaccgccgctaacctacctctaggcggggccggttacctgatttcccggttaacacggaaggaaactgacaaacgaagcgggggaaatggtcacgtgattaccgatcacatcgggttctctcgctggttccggtcgttttgaataaccggtcaattcaagtcggccccgggcaccgatcgccgattcacacacagccgtgacaaccgggaagcgccgggtgtttcacaagggaacgtcacgaccagtgccactcgcccgtgatcacctggaaggctgacagtgaggcactggaaacagagacggttcatacttcgtggcctaatggcctcccaattctaccatttgcactttcatggacagagaagacccgcggcaatcgcctcaaacagaggctgcaggggctggatcgacgcagatcacgaacggggcctcggcagtttgttaagaatcccatcatctcagacagatcttggactaccgacttgcaagtcgacttgtctatagtcgcgtgccagctgttggtccttgtacaggcctggggaaaatataccgtccacgctcatagcacacttttctggtgtgacgatattcacgcgatgaaggtaatcccaaggccgccaagctatcaggcaccgaccggcgtaagatgtatcctggacccatgctaggtcgctgccatctcgacagtgacacctactagataaagaattccgacgagcacgcgcgaaacgttcttcttcggcttcacatgcagcgcctaaaggcggcatggacgtcgtgtcatcgatcattctaagcaactcaagcggcatggaactctaggattgagaagaggtacagcagaagatgatggaagactggctcgagcccattgtgcagtagatgcgcatgtgggacagaaggaggcccatcaattcttcctgggcgtcactcgatatcacatactgggtctgttgtcatcgtctggaccggccggtgcccacgggacgtacttgagggggacgagaatctcacgctggttcgaaacgttgattacctctctcaacagtcaaacagcggacatttcaaccccaatcggagccaacaggggcttctacgggaacttaaagcgagtgtgccatctgagtcacgtcaccaacacatcactgttcatacttagggatttgcaagctcggccggacaagttatgtatggacatgactgtggaaggatgatgatatagatagcacggaaaatctagtagtcatatcgggtacccaaatggtacgctttaagcgttatccgagcagattcgttaacacctcgaaggtgagggttccgtatcgatgcatctgatggctcctcgacgttatcgaagtgactgcctcatacatcatactgtgggtggagaaagcgataccagggtatatcatatctctcatcgaggtttacaatcgtgtttctcactcgacaataaacgggccaaagcacaatcgagattttcttgtacaacgtgattcgcaaaattcgcttgacggacatctttccactctgtttccatgacatcatttcttctcgttggccttctcatcctatttacaaaaccgagaaggttacgagttagctgttaggacgcgatgcatgttcagacgaggcgaggcggcacgtacgaggcagatgcagatggccaagaggagggcggcgtctactcccggagcgacggtgacgatataggtctgattatcgactgtcgagagcatggaaaaggaggtggcgtatcagtgtgggatcggatagctaacggaatgcttggaggaaggcaccgtgacttcacgcacaaaagacttctcccgcattggcaaacgaccgactgatcctcgctacaggcactccgttcgtcgtcgtgatctcggcacttcggtccaacagatctccacggagaaccaattcatgctcttgtccatccccagcgaggtttttgaatgtcgccgtgagcttggtcccaaagctaaaggacgacttgacggtgaacatgaccgagccggatgaagggtcgataccttgataagtcgagtggatggcgatgagtttatgttgaatagtaaacagggtttggcctcgggcatccttgacggctgcgaagaacggagaacgggacggtcagccagatatcgacaagggatcgacgaaccggtcgactcacacttgttctgacggaaagagaacgtgctgccgtccacctggaacattgtctggccggtgtacgcatccttgacggagaaatcgtccccactgagcgacatcttcctttccctgaccttgagtgcaatctggcccttgtgttgtgtgaagtaggggatcactccgatgggttggggtacgggttgaagaggaggaggtggagcaggtccagcaccggcgaggttggacaagaatcccatgttgatgcttgcgttcgatcgaggtggtgtgagtagtctttacttggtgatgaggtcgagtatgtacggcagatgtgaagaccgcttctcgcctcgaacatatgaaccgagtctcttgcctcgactcacggagtggcacttatacaggtcgacctgagaaggtgcaagatcatgtgagagctgtgcaaccttggccgggcgtcgcggtcgagccaagctagagcagaggatgccgagatgatttgattccgttcggcgctgaattgactccggttccgcgtcatcatcattgtcatattcgtgatcatatcggtatcgtaagagagtacaaggtcgctcagcaagatgctcaaaatcgaaatcacagagtctggtatctgatcgtctgggccaacactccaggtatggtccagcttgaaggaaatttcggttcagacctccccgccaaggtaggcgaaaacgagaaacgccagcccatgtggaccgaccgcgacgaggcgccatccgaaccgtgtcagtcgcatcttgaccctctctatcccccgcatcggtcgaggcgccgtcatccctcccggtctgctcgacattggagtatgcaactcggcaggatttctgaagaaccctccgagtccctcggtccgcaacgtcgaacgtatcatcggcaagacggtcgattggaacggacggaccatcccccggatccgggtgggtctcgccttgaactccaacccgggcgcacgggtctctttcagcttgaccaagtcttcgatcttcctcattggcctcgtcgcgtattccgccaagaaggatgccgtgatcccgcccgtgacgagacaagccgcctgagccaaacgagctcgagtaggcgctttagggtgtaatccgtactcgtccaccaactcgcctgatcctactcgaccatactcgttgccgacgagcacgagctgatcgtcaggcgtcaaccaagccttgacggccaagccgactcgacgggaaatgtcaaacgtcgagaagaaaaaggcgtacccgatcgcatcccgcaccatggcgtacttgacgcccgcccacgctttccgaacaccttggccgaacccaaagaactgtttgacttcttgcggggatttcggaagacccagcgcgcggatgggacggaacggcgaggtcgtcgacctgagtccgaatacccgtgaaaaggcttccgaccaggacgtgatgcctcgttgtaacagtctagcaggtgtcgaaaaaaagggggtcaacggtcgcggccccgcagcaacattggtcaagcagggacgtcctcgaactcacttgactgcgttttcgatcggtgcgaacgccaccccctggatagcccctgctgcagctccggccacagcgctcagcaacgtcggatgaggcagccgatgtatgctctccatgaaactgatctgatcttccgctccaaacgataaccagacgggtccagcctcgccctcgacctgatcggtcggctcgtcctgcccagaaccagtcgcctctgggatagaggtcagggtttccccacgcttagccaaagacgtccagcgctcgaacatggtcgaatctcctgtcacttcatcgggatgtagctcgagatccggatgaagtagcggtctcggagcgaaaaagttgagacgggagacaagatagcagaagtacgaatgtgatgtaaacagcagcgtgccaagggcggtattgatgagtaatggcggcaggatattctgtagtatcgctcgaggctggcagaagagtcgtagaaaaacgccgtttcagtcctcacgaccgggtgaccaggaaaaggatcttgtcccgctcacgcctttgtccttgaccagtgcacgaatgaaagatggtgagaaggactgattggcagatagcgccatttgccgtagcgttgttagcgtgtccactgtagtattgatggaattgtcatcatcaaaattgccacatcgttttgtgacccggccgacttgcctcgagtcggtctgtatagtcgagaaggccgtttaaagtatacccctaacctgcacaaaaacctcacagtcggtgaacaagctaccctactgtattccgcctttcataaagaattagggacaattacgtaccgagcaagagcacgaaggatctggcgaatgcggcggtcgccgatgttcctgtggaagcgttctgagtggccgtggtcggctcggcttttcgtcgagcgagcttttgggcccgacgaaaggcgagcaagatcttctcgtcttcggtgaacgattggcccatgacattggtaagatactttgggagacgatgttgatacacgatggctagatcaggggggctgatggagttattcaaaaggtctattcgagatgtgccaaccgttgtgagtctgacctacctctacctggacttttaatcacgtgacgtcatcgtcagccaagttcccgtgtgtcgtcggggttgagcgacgcataggtcaattagttgactactagttggtagtcgtggtaacgtcttgacgtccggtcatcgccatcatatcgattctatctatatacagaagtatctcttgttagcttcatccataaatctccagccatgaccaaccaagacttccacgtcgtccgagctaccgaggccgatatcgtgagtaccgatcgacgcccgacatccacctcgcgatctgacagttccgaccacttgattttgacatgccagcccgacatcttggggctcattaccgagctggcagtctatgagaaagaacccgatgcggtcaaggctactccagagctggtgcgttccatcgccatcgtctggcgaatctccagctgaactagtctacccaacccggctttgcccgaaaattctcctgacccgaaattcccccaaaattcgaaaacagttgaagaggaacatattcgagcaaggtttcgccaactgtatccttgccaaagatggtaccgaagccaacccgggcgagaccatcggaatggccctggtgagcgttccccctgagccccgatccaggaggttgtcccggctaacagcgggaatcctttgcgtatgaacagtactttttcaacttttcgacatggctgggcaaacccgggctctacgtaagtcatcctcggtgcaccgctactgtatctcactacgaatccaagggctcacatatccgcttgttgggcgaactgcgaacatagctggaagacctctacgtaactcctaaacgaagggcgagcgggatcggcaaggtcctcttcggtcatctcggccgaatcgccaaagagaaagattgcgggaggatcgagtggtgtgtcctcaaggtgagcatcgcgttcaccgcaccacgtccagtctggtcgtggtcgtacaaccggcgcagagctgatcgcatactcgtccctggcgggttcagtggaacgccccgtccatcgggttttacgaaaagacgctcggagccaaggcgctggtcgaatgggatacgatgcgtctcgagggagacgagcagattagcaggctggaaaagtttctgaactagacggtcgagtcggtctcgacgggactggactggactgggtcatgtcaatcatcaaaatgaaatgcaaaagcgacgttctcgcaatttcccggtcatcatctgaggttttcgagcatcgactgtaggtgttgtgttatgccgtgagcattggtcagtcatcagaaaaaccgaataagcgtagcctcgcgatagatcgacctgaaggtagacatcgggtaaatgacattagctcgcttcatcctccagctgtcacccatcaatcagagtgcaacactgatgagcatataaagcgagtcgcccattaagttcacaaacgatccactcgccatagctcagattagcatactatgcagaaagtcccgatgagagagagtatcgggacgtcaatggcttcaaagtcaggcgtgatctccaggcgcacgtgatcgtcatcaatgcaaatggatactgtttatgagcgcatctagtgtgtggagccgggcggcttgccttgtgtgtgctattctacaaagtctattcgctctcgaggactatcccggtcctatggcttccacacgacatctcgtttccccctggtctctgaaatcctcttttcgtactcctttccgctgtcacgggccatccgcctcatggcgagaatgcggccatcagggttcttccacttcaggaccgccatcttttcggccttgtccttctctaccgtcgagtcggtagccgcttccgcttcgtcaacaagcgccacctcctctgtctccatggcagcgggactcatatcgtccgccgtcttgccagtcggcagattcagcgaggtcatgttggtatacctctttcgggccacttgcaagcctcttcgcgcgaaagcgtatccatcttcgtccatggtggtcttttcaatctcgtaatcgatcgtccctgcgttttccgccgtgcaagtgaatcttcgtcagtctcgtcaccacaaggaattcgcgtgcattccactcacagctgacgttccatggtcttttgggattcacgctctcaaagtcgatgggaccggtcactttgctatcgttcagcttgttgacgaccgatactttgaggcgcacaacaggtgcggtttcaataggatcgtccgtctttggggtgacgaatgccagcagttcgcttccctggttagcgtcaactaccaggttgatggtctgtgcatcgatcggactttgatgagtgatccctcgagataacctcggcataccgaagcgtactgacctcgtgcgggtacaaggcagtcgcctcttctagaagcttttccaacaacgagacagacaatttgaaagcttggtctcccatcgctgcgcagccgtgtaagatttggtccatatccgccctgtggttgcacgtcgaagattcagtcattgcttggtcaatcgaagccagatcaaactgacagggagacgtattgatagccaaagattctcgccgtgttatggtaaaccacaaagatgccgtccattccacctattcggacttgcatgctgtatttcaagaatgccgaacgacacatgtcgtaaaatctagcaggacagtggctgacgtatcagtactgctggtttagcgatctcgtcgaggaaaactgactctttctcaaacgagttttcgagaccggtcaacttgtatacatcgtaagcgctgttttcctgtagctttgaaaggtaagtatcgagctatcctatcgcaacgtattgagtgagacttgcctcgtaattggctcgatcgtgacgaatgaccacggctgcacgcgttttgatgtcgaatgttcctgaacccggcagtcgttcgtcgtagcagtccagctgcgaacgcatcaagatgttggatccctgtcacaggagcggagtcagcgaggttggcccttgctcgaccacatccggagaggggaaatcaccttgcagtatcggtacgcttctctagcgttcctctcttcctctgatactccagattcggggctcgagatcataaaccgcttgagttccttttcgtcgctagtcaccatcttctccatcactcggccctgacgaaggtgcaaagcggatcaatactctcgatcggtcgcaatatctaaagaggtgtcatctgctcaccaaatctgacaagatgttctcatcgatatcccatcgcttgtcgttatcaaccgcgtatttgccgtccggcatcgccttgacccataacatggccgggagtttcgccccagcagggaaatctttacgctgaaagaaagaaacggtcgtattcagtaaaacgctgggcgagagcgctctcgaatatgacgcctcacctcgttggcgaacgcctgactgagcttgtcaagattgaccatcctgccacctgtcaacatcccgccatttcacatcaggaccattctcgagttaggagcgagtcccttcccaggcaccgcgtttaactcaccactaatgtgaaagtagatctgactcaacgccttggtcagggtcgatgtcgacccgtaatacttcatccgagagctcttgacaagctcgtacaagtctgggtcttctgaagcggtaatgtattgaggtagacgatgatatgcgaattcatccgcctgggggatgttctcgagcgaagtatcaaagttgtagacgtgagagcggggatcgcgggtaaagtggaccgagggactgtaataacaagatgccggagactgagcaggtacgcctagcgacgatcgtcacgttcgaccttacttgaagaggactcgcgtcaatcctcgtttcagcgtggctaccgggatatctcggacgggtttcacctctacgtcattagtcccaaatggattgagcgatcaggcactcgagcgggatcgaaacttgttcgataagaagaccgactcacccgagatgtcaatctccctgccattcagtctcccatgctgaaccttgatccggttcttcttcacaccctctttcatctggaaagactggatcccggcttcatgctccgctgcgacctctgcccgatgatcaacgagcaaatcgatgatcagcttgaccgcgaggatggtaaacatagacagatggatgagtgtagctaaccttcgaggagatccagctgcttcacccgatccgactcgttcaactcgtccgcctctgcatcttgcgtctctatctgaagatgttgcgctcgtgccggatccgacgacaagagcgcgccttgcatcagctctttgaagaccttttgagagctcttcgatctcggagccgagcttgaagggatcggatcgtcgtcgttcgatgctaccgcgtagggttgtgacgagtccgacccggacaggggccatttcagccagctgtataatttagatttgatagggctcgatttcgagacctcggacctgcttgggttcggtccgtgatcatcccccgaatctggcgatcccgatgtctttttctgccttggacgtccgagggagcttttgttcagttgggagatcgcacggggagagagcgggaccttgttcgtctctgatagcgggatggaggcgttcgtcgatccacgggaagacgaccctgacgtatccccatcctgttcagatatcgagaggtccgattcctgagcgacatcctcgtctggatcgttctccgatctcgccgctgctctacgccgtcgacgggcgtcggtaaccttgagtcgaacttgcatgtcgacattgtagcgtgcttgccgtggtatgaatcgacggtggattaccggtgataacttggaaggtcctgatgacatgcatgccgagcagcatcgaagaggcagcagcatcggatagatgttacgaccactttttcgatactccgattcagatctcgaatcaaacaattgcgagtggcctcggtgactatgacagttttcctcctctaaaacttgtcgatcgatacgaacaggtccagataccactttactggaatctacagtgtactgtagtagactcgagataaagtttgattacgtaatttcaatctgtacctgaagtagtcgagaagcacatgcatagctagctacttgctgcttggtaccagatctcgtcttgctgtactcgaatagtatcaagcaactacgacacagccaacagggaatacttgacatcgatatagaagatcggacgttgcaaaggaggcggaaatccacgtcgaaatgtcgaatcaccaacctactcccaacacggacatgatctccgaaggtgaattcatcgacattgacccccgctagacattccaccgagccatttgactgatcgatcgtatcgaacccctggctgggcatcggaatatgacatccagatgaggcttctttgtatgatcgtcagattcgcctatggggtcttgaagcgcagaaccggtgagctagggtccaacctcgttgacaaagaagcacaccgagttgaaaccaaacgcacacgtaacataccatcccataatccttcacgaatcgcgtcaaatctagcatgcgctcgtccacgatcctcgtcatctccctccgagcactcgcacaggagaccatcaagaacttagtcctctcgggtgtcggaaggatgatcgtgatggacgacaaggaggtcacggagatggacctaggcgccgggttgttgttcagggaagacgaaggtggcgtcggtcaaaaggtcggtcatacacttccaccgtccaaccgaatgcccctgcagagacacaacagattgacccgtgatgatgatcactcccgcccccgtctgcgcctcgtcgtagcgagtcgaagcggccctcccgcagatccagtccctcaacccgctcgtcaagatcgaccctcgaccgaccctcctgcctttccacgccggaggctcggataccgagattgacgactttctgcgtgacgaaaaggtcgacctcgtctgcgctacggaccttaccaaggaagagatggtaagccgcattcgcggttcacttcgtcccggtcctgcctcgaatccggctgatatcgccatccgtccgaccacatgcagatcaagctgaacgaagcgtgtaggaggacgggcaagctgttttacggagccgggtcgtacgggttcatcgggtacatctttgccgatctaggcgaatcgtacgaatgggtcatggcgtgagtccagccggtcgattccagctgatctaccagctcgtattgatcgacatggagacgttgcgcacgttcgacagctcggggtccgcctcggggtccggacaagcggggagcgcaaacgccaatacaaagatgcaaaagaaaaaggtcgactgtcggccgttgaaggaagccctgcggaacagcccgttcgacgggttgaccaagaaccaaaccaaggagaccgtaccgagcgttatcctgggcgtgcaaggtcagtctggatgctcgacatggggtgagatcggtcgtgttgacgggatggtcgtgtttcgttggtattttggtagcgctctgggagtaccaggagatgcacaagggcaagctgcccgagagcgaagaacaggatatgacggaattggtcgagatcgccgagagactcaggcagagtctgaaaatcaacgaaaagttcatgaaagaaccaccacgacaggtgctagcgtgagtggcggtccgtgctcgtatacccttcgaggcaactatcgttgaaaccagaaatacgatccccagacatctggccaacggagcctcgcacgagttcgcccctactgccgccattctcggtggactcttggcacaggacatcttgagggcgctgagtagaaaggagaaaccggtcatgaactttttagccgtggattccatggccggaacggggacgacgaccaggtggggcatgggcgttgagcaggaggtatagaggattccgcgaagggggcgacctgcataagttacgaaactcggagaagcggcatcgaggcggccatcatatacgattcccgagcatcctgtagtagacattcagtatacatgggaaggcataatatgtgtatagagaagagtgtttgccatccacattcaaccttgtctaacttgtcgaaaggcgacgcgcgcgttccgattctccttgaagcggatccggccgacgtctgttcaacgaaagtcgatatgatatgcataagtgatgcaatatgtcgacaagcactagcccctcctccatctagagtcaggtcaagataaaaacacagtcatgtcaggaagagatgctacagacctgccgactgctcctcggggcccagcggatggtgagtacctcggcgtactcgtcgcaccgtcctggagaacactttcgcaaattgcctagtcatgcgcgagtcaatagctgaatcgaacgaacctccgtctgtgacccgccttcctcccatccaggctaccgaagggatagagatcgcgatggtgactcggggagacgatacgatgacagagatgcagcacgtaatcacggctctggatctcgaagatacgatgacgattaccgacgagccggacgtggtggagcttatgatcgaggccgttcagagcgagatcgtggggatcggtacgataggcgacctcatgatgatgatcgaagacgagagggacatcgtgtaggagatcgagacgaaggagtccggcctcccaccgctggtcatcgtgacgacaacagggacagaaggaacggtcgaccctacgaccgtcctttccctgaccgaccacgatcacgatctcccgtccgacccctggataagaggagtatcgaagagggaaggcgtcagcgtgaactggaacgagctcaacgagctcaacgtggtgagagcgtccattcggccggaagcggggcgggcggtcgagatggtacccctggtgccggtgccgctcagcccggtcgacaatcagaacgtcgtcgggaggatcgtcgtgatgcatctcccgaggcgtataggagaccgaggaaccagcgtggagaacatgtcgactcgcagacgccgcgggataaccagggcgacgacgagaggagggaagaggaagaggacgacgatgggatggaggacgctcaggacgacatggccgccatgctcgggttcggtggattcggatcgaccaaggtcagtgcattacccccttgaccatgtcatgagccttcctgatggtatcccttgtcaacagaaccaaaaggtatcgggcaacgtcgagggggccgctcagatcaagcagcaacgcacgtggagacagtacatgaaccgacgaggaggtttcaaccggtgcgtctctcgacctgagaggaaacacgcgtcgaaagcttccgatctgatatcgcttattcgcttgacagacctctggacccggtcaaagagcccaaggtctggcactgagtgcggtcgtttgcggttgcctggatgtaggaccgccgagctcgagatcagtttcgtgggggtactgggccgcggcctagaacagatttctcctactttgatgcaactcggcattggatacatatgagcatctcattcgtatattcggcaatgtttctcgatagaaataccttgcgatgtgtgtacggcatcgtcgaaacttccgtcgacactgcagtggattgtctcgcggcaggctgagtcaagtcaggttttcaccatcatttcatttacttctcggctgacctggtcctagatcagaagcgccgtagatctcgactcgtcatctcacggcacgtgatcaaagcagacatgggatgatagatgctacacaagagaatgctcgaaaaagactagagagacatgaaaagtatcgtaaaaatctcggccgttcgtgtacgtgtcgtcagttcttgctctttaaccagtcataacccaccctcccctttccctccgacctcccccacgtcgtgaaacgactcccagtgagcctgcctttcctccgctgcgcgcccaatctcgagatctatcgggagccatgctagaccaaactatccttcttctgcccggtcagctgtttctctccggcagggagatcgatggcatgcgctctgacgagctctgccttgacgagcagggtctgaccttgttgttgctgtatcgttggagtcggtacgaggcggcaatgacacggtatcagccttcatctcccctactttcggtcgacacggcgagacttaccagcctgtcactatgcaacagactcccgagcttgatcttcctctccccacgcttgaccatcttgtccgcatgacccgtcgtgggtaacgtctcaaggcccaatcccaaagggtcttcgaacgtcatcagcgatcgcttgatatcctcaggagggtggtgatgctcgagacgggagatggtcgctccgggtgaggtggagagagggtcggccttagtgccgacgtcgacggcggtgttgggtgtcatcgtgggggaagggcgggagggtgtgggaccgagagtggcttcgcacatcgcccggtcataactcttgaggtgctgtacagtgggagactttttgtgaccaagctgggcatgcctaggcggtcagtgtcgagggacgtcgatttcaaaggagcataattcacatacgggtgcagacattccgttaaagtctcgtcgaaatcgttgatcgattgattggtggaagttgatgtgatcaaagcgagccggtgagtcgggtcatccgcagtcacgacaacgttcgtcagaccacaacgtgtccctttgtaggcgtccttgatgaaggtctcgaccgcctggctggtcacatcgatggatcagctgccaagtgcgagtcgtgcgaggttcatgatggatggatatgcgaaggacaaaggtggtttgatctggtggatcaaacatgttgatgtttctaacgatgacgcaatgacatagaaccaaaaaggtttcgcttctcgtgatcgtcgcgtgtcgggccgctcagtaagatgatctcgagtagcaaacaggggatgcaagagcttcctctcgacttcgcgactttggtagttagagtgtccaggtcactttctaattgcggtagtgtcccctcatcttgacgagttgccaggcatgcaggcaggtcctcatcattccgcgttcacagacgaggcgagtagaaggtcgtacaaccaccgttgccgggcggccggagctgtgccgaggaccctatgcggaatcaaaccggctgatcgtttcaccccccttccccccccccccccccatctctacaaacgggcgatatggcgaggagcaaaggcggatcgagcgcagaatcagtaaaacaagacgagcctgtggtgaaaaaggcggcatcgtcgaatgggatagcgagcgtgatcggatcgagcaggaggatcacgtatcgcccgtggcgagagatcgacctagttcacaaaaaaagcgggcatcggctctgtatcgcgcaccttgacgtcctcgatcctggatggctcgggactccctacgctcttcctacccgatcgcctcaccgccactcacatatcgcatcgccacgaccctaaactcatgctcgtgccctcgatctgcctctttgatttcgctacacctaccagcacccgtgagctcgccgaggagggttacgccggttgtgaggtccgaaccacccacgccaagaccgagatcatcatccgtgctacccacacccaggatgtcctcggagagaagggcaggaggatcagggagttgaccgccttggtcgccaagaggttcaagttccccgagaactctttggagctctacgccgaaaaggtcaagcaccgaggactttccgccgtcgctcaggccgagtctttgaggtacaagcttttgggaggtttggccatcaggcggtgagtctacatgtttttcgacgcatgccacgacacgcgtctcatccgtgccctcctcgtcacagtgcatgctacggtgtcctccgattcgtcatggaggccggtgccaagggttgcgaggtcgttgtctctggaaagctgcgtgctgcccgagccaaggccatgaagtttaccgacggatacatggtccactccggtcagcccgccagggactttatcgaccaggccgtcaggcacgtcttgttgaggcagggagttttgggaatcaaggtcaagatgtgagtgtccgcgaggcgaggtgggccggaaaggatcgtccagcagctgaacatggtctcgcccttcgttccctcttttagcatgaaggcctacgaccctaccggtgaggccggccccagcaggcctatgcccgacctcgtctcgatcgccgagcccaaggaggagcagcccgtcgagacccactctgagcaccgaaacggttctcagccggccgccgtctacgagcagtcccaggaggccgctcccgaggcccaggctgagcagcccgctcaggaggaggctcccgccgccgccaacgccggtggagagtggtagatacgcccgcccgtcgtcgtcgatgatgtggatgtacggttccctcgtctggctcagtaggagcccgaggggttgtttttttgcgcgtttttgaacgatacaatattgatcagccgcactggaccgctctgtgacgtgtgctccgagtgttcgagtgactggatgacttttagaagatgttgaactgcaacagtctctcggtttctgaatgctctgctctggccatgagcaatcgaaccccttctcatactacaaaatcgtagtcgtttgcatcgcaccttggcaggctaggtaacaagcccaaacttgctaatctggccatcataagggaaaatcaagtctgcgatcctgacagacagctttcgtctcgtcgagacgaaagaagagtagagtgggggggatcgacgcctagactagcacgaataatataggagctaaagatgtcttgcgttagtgtcgaccttgcctccacaagtcaaggaccacagcctcgatcgacaatgacctgatcagccgagttgcagagcaagttgccgggacctccatggtaggtttgcatgaattgaaaagatagagcctgtgagttagtttcactcgcgatgacgcgatcgacgctggttgaaggattcggacgagaccgaatcaagcatcatggggcatcagatcatcatgttcgacttgttctctgtcaagttccagacactctaggctacatacatacacctttgcacagctgatagctgctaccgagcgttctaatagaccgccagaattacgaaaccaatcatatagcaatcgaacttgcaactcgagagtcgcggaacaggacgacaggatgaagaaccactcggcccttctcgaggccatcttgccgtacctcgggctgatctattttaccgcctggtccgtctcattctaccctcaacttttgctcaattatcgacgaaagaggtgagaatcaccggtttcccccgtcatcacctagccgttgagctcatacgggacatgaaccgatctaacgcaccataccatacagcgccacgggcttttcgttcgactttaccatcctgaaccctctaggtttcttgtgctatactctctatgccgtgttgctccgatacgatgccgtcgtacgagatcaatacgctcgacggtatgatgggcacgaacctcaggtcagccgggccgacgtagggttcgcgggtcatgcgttcttgttgagctcgatcgggctcgtccaggtgagtctcgatggatgaacgggacgggacggtgtggattttgctacatgcacacgaaaaggacgagctgatccggatgagaactgtcggctcataggtcttgtattacggctggaaggcttcccgggcgcaaagggtcatgaacgctgatggtcaagaccggggaacttatgtctatggcgcactaccccggtcggaagatggagaggcggacgacgatgacacgaaggctcacgccgattcgaggggacgagaggagttgacccgctggggatcgtggtccctcattgggatcgctgtcgtcctggtcgtcgagggaatcttggtggccattggaaagcaagaatggctggatctcgtctacgtgatcagctacgtcaagctatacatttccatcttcaagtggatcccacaactacgcatgaaccatgttctccggtcgacagaaggtttctcgatcgtcaccgttgcactcgacctggtcggctcgatcacttcgctagccgaactcgtcatcgccagctacctcgccaacgacctccccgccatctggggcaatcccttgaaactcggcctgagcgggatcactttgctcacagatggctggttcgtcggtcagaaattggtttttggcgagaagcaatcccgaaagaagggcggaggaggggagagggagaggttgatctcgggtaccgattgatccggatggattcgactgtatgagcggtcgtcgcggcgtaaaaggcccgacgtgaatggtataatcttgtaacacaaagacctcgcatggtggccaaatctagccgatgaatttggtatggctcgccgtgatgactagagcgtcgtcccgttcccgtcgcatctcgacccggatgaacgctagtcggctgccctttttgtcgatcaaaccctgattttcatgtccgaatgtttcagctcgcccaaatcaacgcagccctcacagagatcgctactgaccttgatgatcatggtctcgcctcccttgcaggtgttcataaagctcaaggacatgtcgacgctcaggccagaatgactcccggtcgtcgccagagcgttcccgctcgcccaatccacgatggtcgcgctcaccgacccgtgaatacttcccttggaattgagatgctgaggctcgagtacgagcgcactgacagattttccggactcggtcgagggaaggacggtcaggttttgcaagaggaaaccgtagatgggcgacgccgtcagcgacttggtgtggtgggcttgagccagctcttgaggcgtgggcgatggggcttcaatctcggtcatcttagttggattcggtggagctgcgtaaaggaaggagtctgggaagagtgtatttgttgtgcaaattagaagaggatagaacagcgtgtaataaaagtcaagttgggacctttcgacctcgacgtcgttcgggtcatacggctgctgtgatcgtacgaatcgtaaacaaacctacacaactagacccgcagggttgccaaaggtttccatcccctcaatcaaggctacgaatcttttcgagaacccctaattccagaactacgaaacgaagctgacgaagacagtcaggtcaggcatcatcggttccgtaacccaaagaaccacgcggtttgttccatgttattcctgtgtgatgtctcaagtattacattatcgcgaagacaagacccacccatgtagcatcttgtccccggaacatcaactctactgccggaatctatcgacacaagagctcattgtggtcgaggtcactgccatctaagccgattccgatgtgatagcagtctcctcgccatcaacatctacaagttggcccataccggggggagggcagcaggcgtcggccccgcaagcctcgggagggcaacggatgagacaggcacgctcctggcgaacaaaaggtaagtagtcagttctcggctcatcgaatatcattttgctagactcacctcggcgagctcttcgtcatcgtttccaaactccggctggatggtgctgctgtgtacgccaaactcgtgcagaacctttctaatctggtcggcgactgtcatgtagtcgacgtcccggctgaccataacgtgcacggaagcgacgacggtcttttcggaaagttgccagatgtggagctaaaaccaggattttcaagcgcaagggttagtcgacggcgctccattttcaaatagcgcaacttcgagactgacctcgtgaagggatacgacgccttgacaagacttgatggcatcacgaacagcctcgagtgagatatgcgaggggaccccttgcaacaagatgtaactggcgcttttgactggaaaggtagcgatatagcttagcagtccgcaatttcgcagaaccagcagtcggcggtaaatttaccgagaggcagtgcgctggagaagatgatgcaagtgatcaagagcgagatggcaggatcaaagtagtatttccagtggccttcggcgctgtcgttgcaagtaaaaggggggcgtcagtctgatgttcacggagctgcacagtttcgcccacccgcgactgacaacatgatgacaagaccggcagcaataacaccgacgtttccgagactgccatccggggaagcgagcagccattgggcgatcagcttcaagcccgagtatcatgactctcttatttaaagtcactcacgcgtccccaagcacatgcaaaaagactcctcgcatgttcatgttaccgtgcgagtgcccgtgtccgccaccgctcccaccgtgagagtgaccatgaccgtcgtctccgtgcgaatgtccagcctcggcctcgtcgtggtcatgggcgtgctttccagctccagcctcggcgtgatcgtgaccgtcgtgagcatcatgcgagtgatcatggccagcatgatcagcgccgtcatggttggcctcttcctcgttgatcctctggcttctcgccacaggggtcttgttgctcttggttctagcatggtgggagaacgaattgatgccaccgtttgaaggccccatcgagttgggactcaagggaccagcaccggcttcatcacgggggctgaatgccgagcctccgaggctgatggatccgtttccggtcgaacgaccatagccatactcgtgagcggcctcgatgacggcagcacgggtctgagctgggtggccgtagagggacccgaaagagtcggatcggccgtgagcgggacgagacgagatggaagaagatcgcgggagtcccttggtaccgttgggcgatgaggaacggtcgatgggtgcttcgacggtgctaggggggtggtcgtgagagtgaccgtgagaatgtccgccatgaccgtgctctacatgttcggaacctaattagtcaagcgtatccagaagcctagcttgagatgcacgacttaccgtggaacaagaacagaccgatgatgttgctggctaatcccaaggatccaacgatgacgacgagcttgggatttgaaatctcgctaacgttgaagaacctctcgatggcttccatgaagattgagaaacaaagggcgagaaggaagacaccgttgaccagcgctccaaggacttcggatcgttgccatccgtaagagtttttggccgctacagagacgaaagtggcaacatgtaccgctgatgagccaccagcgacatttgtacctttcgagtgtactcacacgaaggcttagtggcgagcttcacggcgtacagggcgacgatcaaggacatgacatcgttcaacatgtggaacgcatccgagatcaaagcctgttgggtgcaaatagggtttttggaaaatagttccatcatcatacgagatcagtcattcgatcgatatagcctttcccaattgaaagcccgatgcagcgcgaccgtacttaccaaactaccaacggcatatcccgaagtgatctccacaaagaagaagatggtatcgatcaccagcaaggtgatgatcctggcctcacgatcgaacttcatgatgaaagtttcgatctaggtcgggcgacgtattccaaaaatgaaagatgggcgtccgaaagagtgcggatcgcaaagggaatcaacgacgtatgtgaacgtctgtcaagagttgaattatgacctgtcgacgtaaatgtggtagtatggactatatctcgaaagcaagctgtgtcttgagtccgtaagaatatcttggatggatgggatgtgatgattgcatatcaaatctcggagagttggagatgaggcgaggaccgagggacggaagcaaataaaggcaaagccaaagaggcaaagaagcgaccctaggcatttcaacagtatcgtgttcaatccatctatggttgtcataaagttaggaaatgtagaatgatcgcagacaagatcaccgctacatgtcatagaaagacgattcgcacaccagtaagccagaccagtagccaatgaggcggaaagagatgaagcgcgaggcccatggttgaccacctgtagccaggtcggtcgacaccttcaggcaaccgcgaccacgacaccagtacgagcctgaacggccagggcgagcgccttgatccagagcttggcttcgttgttcgactctgcggaaccaccagcaaggagctctcggtgcaacctctcgaggtcgctcttgtacgcgagagccactcgacgagctcgttcttcagcgacactgaaggcactgaggatctgcctctcgtaatcgtcttccgtgatgccccaaatggcggcgggagagcgcaagatcctcgtttcgacgacttgacccggcatccttccacgagccggcgcactggctccattggcaccgatgctggaacccaaggcggtattgaccctcttgcccagcaaatggaacagaaggacggccggaacatcttcgacggcatcgacgacgagctcgtccttggcgtcgggcatctcgagatcatccttgagatgcttgttgacatcgcagacatacgtggcgccccgttccatggcagcgatgacgatcctcatggatgagatggcctcgagcgcttccgccaaggcctctcgagccaggtgctcggaagccgtcgggtcatcagcggcgggtgcgataggagcaggcttctgcacgaggccgatgaccagtcgagcacagagagcttcgagggacgcgagcgcaacggccgaaggaggaatcgcagcagcccccgcagcacctccggaaacgccaaagtcggtccccttggctcgaggagggctcggaggacgagagacggctcgggagggcaagatcgagctggccatcttgccgacagccgtgacaccgccgctgggagcgagcttgtgtccgctcgctccggagacgccttctttggtcaagctcgcgagagcacgtccgatggcctcggggctgggagccctgccacccgcggtacccgcgatcgccttttcgtccgggttgtacttggccgtgcaaacgcacaagcctttccagacgacagcgacgacgacgctggccacccaggtctccccgtcctcacgacaatctttgcaaatcatctcaaaggccttgcgagcgggatcgaccttgctggcgaatccacgaagaccggtgggaatatggttgatcgccttggcaggcaaggtcgtcgcggcaccgacgggcagcgacttgtgcgtggtaggaggactcggggtatcgctgccgaccaatgaagcgataagctgcttcttgatcgatcccacgaggggcatgacgacccgagcgaccaccgagtccaacttgtccatcacgggccgcaaggtctcgctgacgaaacgggggtaagcagtcgtctcgagcgcgacctcgagaacctcgcacgtctcccacgcagcgtgacagatcgagaggacgtaggcctggaccgtgttcaacaacggagtcgtgatcggagcggcgttgaggttgacgggaagcgggaaatcggcgtgcgtgattccgggcaagagaaaatactcgagtcgcgaagtgtagatggagagcgacctgaccgaagttcggaggacggcccgcaaaaggtacgcatcggaagcgggaggcggcaattccctgtgtgacgtcaaaacgagtttcattagcatgggtcaaacacatgctcatgcatatccgaccgtagactcacttgacgaccgcctctcccagaccccagcctgcgcccttcctcacacccttcaacgatttggaatctacgccgagcagacaacggttgacgacctcgttcagcctcagaccgatcgcatcgatcgtcgcgccttcgctgggatgagcgctcgcgacgggcaagggcgtgatcgacctagaccctgggggcgagatgccggtatgaccgctggctttgccattaggagcgggaacgctgccgttcacagcttgagcctggccaggtgcgggagaaccgttggtctccctcggggcgagactgagtcccgcgagtccagccagaggtcgaggcaagctcttgctcctcggatgacctcccgcgctgatactcctctcgttgagctgagtggccgtcttctcatcttgagcgtaagccggattgagcgtgctcagaccgttggcagtcgccggggtagtcgatggaggagcaggactggcagtcctggacccgactgatgggtccgtcgagttggagcgcgaggggcggaggagagggagtgatcgaagggattgcatgatgaacggttacgaatgcgttgaaacggttgtaagcgagaacgatggtaggctccttggtatgtttagcggcttagtgccaggacgaagaagctaggtgctgtcgatacttcgcaagtgatagtgaattcgaattggaaatttgagggtatcaagtcggaggtatccgagcgacgaacaaatccagttgatgcggtgggacgggagaggagtcgagtgcgggatcgtgctcgtgtccgagtcagcccattcaaaaagacagagagagatgagaatcgtcttttcctctgtagagacggtgtagtcgtctaggagacaaaagtaaatctcctaaaagtgatgtgtttcccaaataccgattttgggagcttttatgggtgtgcagcgtttcagaaatctcgtgctttcgtgtcgaatgatgaacgaaaagtagagcgaagaacggcgggtagtttgatgggcgggtgctcgaattaaggcggcttgcctgcgctgttgaggaaagtctcgatcctgattcccgagagtctgatcagacggttgttggtggaggcgaggctgcgggaggagctgagccaggaagagcaaaggggataatggcgatgggggtagattgccatgcgagattgacagttgttgattgtaggtgttgttgaattttggttcatccagtaaatatgcagcgagacggtgcaggcagatggcgagattcgggagggtacaaatggtgatgccggtgtcgatatgcggatgaaatgcgcggatcgtatgaaaggaacaacatgacgataggagagatagagatgtttcaaatcacgataccaacgtggttgagcaatcaaagggacacgataggggagatgacggatagatcagcggcccgaatcgatcaaatgctgaaatcccttcaagatcacccgatcccctcccatcccctttttctccggaagatcccaccgggcaagggaggaaccttcccagaaggacggagtggagatcactagcaaggcacgtcaactcacccctgactcgttaagttatcacctgaaccactattattgctcttcttcttcattagacgccagacgatgtgaggttccggtctcggttagagagtccttgggccgggaaagtggaggatagaagcgggcgaagagctcggatcgacctcgattgataggaagagttgacctgaggatatgagatgcaggtatatagacgtttgaccttgaagaattgagcgtttcgaaaaggcttgcgagattgatctttcaatgacgtaggggagaggcagacgcgatgtgatggcggtcttgatatgacacgggttgaccgagtgatttgcgagggatctgggtttgagtgaggtttgattctatctacctcgagaaagacgaggtatgttgatttgataggtgtgtaaggtttgacaatatcgacgatgtaagggggagcctgaatgatcgaacgaatagcttctgattgggaggggatgcgagagggacttgcgaaaaatgggccaaaagggcgaagcaggctaaaggggagggggggggcagcctagaggaggctagaagggcgagagggagagcggggcacgcgcagacgcgagtcacacgaagcgcacaaggagattccgtctcatcaaataactttgtacatccggtattaatcctgcaccatgtcgaatcccggattcgaacacaagacctctatatccttgcaagagagaggtgtaatgatcctctgattgcagacctgttccaaagcggaaaacgcctgtgtaccgtacgccaaatggtgtgttgcaccctcgattccctggccgggacacattcctaaaggaagttgtggggagaggatcttgatgtaggcgtcgaacctcgaaaccctcatcgacataaatatggtagagcgcttcaggcccgatgtcgatacatcatcagctcacaagctcatgctcaaaggtcatctacatgcgcttcagctcgatcgatccacgccgcaaaacgttaaagccccctgcccaaaccatcaacaaggttgccacatgagagcagaacaatccggttgacgtccacttggtcggagggaacacgttccaagcgtgacatatcagcgcccaaacgggcaggctaacgaatacgatccgtgtgttagctacaccgtagcacagagaccaggtctttgccacaccgtccactcacgtcgcccaaatggggaaccctgacgcccagagcaggaagggcatctgatgcgcgtaccagctgaaaaactggtaatgcagagaccgcgcaaaagtaatgccgatcaggttcgaagtgaacaataccagtgggatatctagatccgtagtgtgtaaaggtgtgaaaacgtatcctctacggtagagatcgatgaacgatcgcaaaacagatgggtactgacggtaattggcttggtcgccctgagggactggcgctcgccaccacgatcccaaaatcccccgacgcaggaccgccagtgtttcgccccggacattatcgcaccacttgaaccaggcaaagaggatcaaggtgatcaccttgatgtgcggaacaatgtcaatatccagatgcgccgtgtgtcgattcaacaaactcacctgacccgaaagcaggactcgcttgaacctatccaagccgaacgtctctggaccgacaaaattccagttgacactccacttgaacaaaaagtcgcgggaaaggtcaaaggccgaggtaaagtagtctttggcaagggcgggagaagttaggaagggggcggccaaggtgatctgcttgtgaaccgacatctaatcagtaggggttccgggcgggatatgccgtacgataacgagttgattgacgagacatacctggacagccagaaccagaccaccacagatggctccatgcgctatgccttggtactggaacaacaggaccaaaagcccaggcaggaagagtaatatgttcatcttgactcctagcgccagactgtaagaaacctggatatcatcagcctctaccctttcaagaccttttccggggtgacttgcgagtagacgatcgagccgatcttccaatgcttcttggtgaagagccatacactcgaataaagcagtatcatcgcgatgggatcgttgaatagcctcaaaacgtagatcgagtgcagtctcaagctcagagatagagctccgagaagaatcggtagcggggtcggttccttgacgagtctcgttgccaattttcgcagcgaatcgatatgtatcgccgggcgtcgttgccacggttgcacaaagttggctgcacttgcacctatgatcgctaggaggaggagtgtagcgatatagaccgcccaccaaatatgttgtaccggcaagaggctgtttgatcctttacttgcctgtgcggagacacctgcttccaacgcgctcatggtcgaattcgatcccggaacaaaaccggcaacgtctaccaagctggcctttgggaacatcttgtgcaaaaaggaaaagaagtagaggtggagagccggatagactagcggacctgtgcccccgaccagtctagaatacacgcgctcgttgttaggcgcaaggaacagggcggcctgctgagtgtatgcgagatagtcgatattggtgtctgcgttaagtatagtcagaacgttgtaagctggcgggatcgagcactcgacctaggaatatgctcacatgacacgaatcgcatgaccaaatatgttaggaggatttctgcattcgtccagatcgctacaaagtagcgatacatatgcgggtcgtacagcattcgaatgacgaggttcaaggctttattcggaacacactgtatcggagaccttgactcaataatgtccatgcgacgtgacgagtacatcctacgacctgcttacatccgttgtcgacgttaccggagtctgtgtatcagtctggccgctgttctgctgcctggcggcgaattgttctctcgtcacaaagacactgtgtcggtatctcttgagctcttctatggatgcccgaatatcgtccaaagcgctgcgtgcgaaaagaaatatcagaaggtgctgcttgaaatcgcaggctacatgccgtattgaactcaccgatgagccgattgagggccacgatgatgcacctcttctgcacgtttcagagattctggataccatcgtcttgctaattcctggatgaccgccggaaaacgatttggtggtcagcaactatgagcttgtgcaaccgccaaacatcaggctcactttgatcgagctgacgtctgtgtacgagattgacagcgagcaataagcatcacgtctcaccgaggtctattcggacggccacttgccgactattcgataatgcaagtgttgcatcaacctaggcatccctcgcgaaaggaacctgtagtgtgacaaaggggacccttttgtttgtcagctgtcccgcgagggctaattgcccaaaagctgtcccgactgacctcgcatcggcgtgtaccgagctacccgctacacggaaggacgagtattagctcaggtactatgagtccagtcaggcgaacactaggaggacaggagcatggactgacctagaatgccaacacggacgtcgggaacccaacgcttcacgtattcgtatacatacccttcaacctggtcatacgtgtgcggtgattcgatgcaagcttgcgtcaagcccgattcctatgatataacaacaaatggcacatgagagatttaagagtctttcagtatatgtggacacgggtcgatgctccagataaaggacaaaccctatgcgtcttgatacaccactcgttcatctcgtctagcgccctcttgtctgtcctgataacgtattcgataccctcatcaacgggccggagctccccatcggtgatgatgacggcaatctctatgataatgtctttgtcatggtccagacctgtatcacatgggcgacctcaggttaaatgttgaagtttcgtctcagtttggcgagcgaccgaccagtcatctatcggttcaacgtgtacaaagaggttcagagtgagcaatgaaactggattgaaagtacacatatggccggatcctcacctcgcaatcgatctgagatggcagatgtgccgaaggcaagctggatcagcctttgttcgatttcaatgtttgttttgtcatggccgtcttgtccggcttacccataccaacgggccatcagctgctcgaagtggagatcgagacatgtctgggtgatccggttcaattttcagcggaattcacgaactctcgcgatttgcgtgaggacggttgatcgtagggcgaagggtgtggagtatgctaatctttgtcgagtaggttgcacaacttgtgagatgttcaggagtcgggtgaatctgaatatacatccggctgatgagtattaccttacgttatttctcataattggttccggaagcgacagcaggctgtgggccggggggggagggttttttgcccccccccccccccccttctctgcatcataatcatgccactatccgatggtagatggatgatggatggtccaaatcgtaaacaacggcgttttccgaatcacgtgacttttatccgtgaaagagcgaacagagcgaagcgataattcagaaccgatccgatcgagagtgatcctacccatgtcccgagctcgatatgaccgtttccagaaatcagataacgtagactaggattgatcatctcagtcagtctcaacaaaccttataccccacttcaacgtacaaaaaaaaacctagtcgaaaacgatgggccgaagcaaagctggaagaggagcaagtcgtccgagcttcgaatcaaagcgtcctctggctaacaacctcgtgattctcgtcaacagcgtgggggcaagtcgaacggaccgggcaagtcgagggatgaccccagcgggaagaatatgagcatggaacaaaatttcgccaagcgtgccgacgggaaccctaccttcgaagcttactacaaggtaagtcgggtcgggtcgggtctccttgagccccaagatcactggtcatggtcgatatcacatggctgatacgggtcgttcgattgcggatgtaggaacaaggattcattcccgagggtgattgggaggactttatgggagctctcaaacgagaattgcctactaccttcagggtcaccggatctcgagcgtgagtcagaatgtcgtgtgtcatcgtccatcttgcagccttgtcctaggtctgaaacaagctcttggtctgcccttcagtcacgctcaggcgatcaacgaccatataaccacgaccttcactcctatgctccaaaacgtcgtcctcgagggtgagactcagcccgcacccaagcagctcgagtggtacccggacctcttggcttggcagttgaacgtgcccaagaggaccatcaggaagagcccggagtacaaggtgttccagagtttcttggtaggagagaccgagatcgtgagtagctcgttgtgacggcaagagacgaaatctcgacagaagctgatatcgagctccgcttgatcggtatagggaaacatttcgagacaggaagccgtgtcaatgatccctcctctcttgttggatgttgagccccaccactatgtgagttttcatgtttcgttcaagagcaaacccacagctgatctcgagtccttgcagtgtttggatatgtgtgctgctcccggttccaaggtgaatatgatcagactgtatacctcagaccacatcgctcataccgactcctactttcacttcacataaagaccgcccaaatcatggaagcgctcaaccctcacacttcgcctacgaccggtctcttgattgccaacgatgccgatgccaagcgatgccacatgttggttcatcagaccggacgaatgcctagtatcggattgggtgtcacgtgcaacgatgctggtgagcaagggacgtgcgaagccctccgtactctacagagattgactcgcgattgttcgcctcggtcaagccgctttccccacgctcaaattgaacgagtctaggaagaagagcttgacgtttgacaggatcttggctgatgtaccgtgagcatctgtcgatctttaccttcgcccagctcctgctgatcaagctggtgccatggcctccatacagatgctctggagacggcaccatgaggaagaaccctgatatctggaagacctggactgttgccaacggaatgcagttgcacgggtatgtcttacacctcggctcgatgggagacgtggggtgctaacccagacccggttgtagagtgcaacttcgaatcctcacccgagctatgcagctcttgcgaaccgccggccggctcgtatactctacctgcagtttcaacccggccgagaacgagtcggtcgtcgctgcggcgatgaacatcttccccggtcaattccgaatcgtacccgtctcggaacgtcttcccggtctcaagcgtcgagccggtctgaccagctggaaggtcgctacatccaactcggatggcagcatgaactggcacgagtcgtacgctcagcacatgggcttcatcaacggcatcgccggcaacgacgagggggcgtccgagaaccttcgggcggactctgcttatgtcgctggaaaggaggctggtgctgcttccaaggcttctggagccagcatgaagcccaagcgatgggcccagacggtctttgcgcctagcaacgcggaccagctcggcttggagcatgcgtgagtgctagatccactgaggtccgggtactcgtgcatgtcccttccctggatagctgacggtcgttttctctcttttagcctgcgattgcttccccatgaccaggatactggcggtttctttgtgtgcgtattggagaggatccccaaggccgctgctgcggaggacgagtcggcttcgactggcggcatcaagagggccatctcgccgtctgcgcctgacggcggagagtcgagcaagaaggccaaggtcgacgacacccccaactcgcctcaaccggaacagcccattcaagtaggagaggtcgagatcaacttgcaggctcccaagggagagttgaaacagggtcgttccgaccctcaattcaaggaggatgccttcttcttcatcaaccctgaggaccccgagctcaagtcgtgcatgtgagcgagaacctcggaagattgcagtgcgtgtacaagctgacttgatggcatgatcatttcatctcctccagcgactttttcaaactgtctcccgatttccccaaggatcgcgtctttgtccgaaacggaactggcgaggtctcgaggaccatgtacattgccaaccagtcgctgaaagtcagtcgagggaaacgatgatgtattgcgtgcagtcaagctgataccctcttatcacttgcaatagagcatgatccagggtaatgattacagtcacgcccacttgctttcggccgggatcaagatctttacccgtcaggatagccgaacgaacccggccgacaactactgcaagtggaggatcccttcggacggtcttgccactatgttgccttacctacatgccggagccttggttcacgccgaagtcgatgacttgaggatgttgctggaagagcagtaccccatcgtgagtatcgatccaccttggcccaatcgctcgacagctcaccccgacgttgacatgtacagattacggagagtgataccggtctcaagggaacgatgcgggatagggcacaagggtgtcacattgtcacctttgcccctaatgatggcaaggacggcagaggagcgtgagtctcaaaactcttcgtgcgccagattcgtcctcattgacatgcttggctgacacggccgtgtccgctactggggaaaatagtctgcacctccctctgaccctccctttgtggaagggggtcggatcgctctccctactgattgataagaaggaaaaggggtgagttgccggtgactgaactttcgtctgcttcaaccttgatctgacgtggttcctattcgatctcagcacactctcgaaccgaacatttggcaaggacatttgcaactggaccggattgaacaagcacaaacgtcaggaagacgccgccgctgcgcaaggcgagggggaagtcaagattgatgtcggtgaggagcaagaggccgaagacgggctcgtcggggaagccatctcggtcgcccagggagaagaggctgccaacctggaagagagcatgaccaacaccaccgcctgagctcggggtttgaaaaagtgtctcgtgtaagaacagggagcctgttgtagtagaaaacagcaacgtctcgtgatcggatttcgcatgcaaagcccgtctcgaacgtcgtctcggctcgttgacatgttgaacgatgaacgaaccatgatgagaatggccgtgtcggcttgcggtgatcgatatgacctgtccgacgagaaggtcggcgtctcgcggaacacgcgtttcggtttctcgaccggtcgatcgctcgaaatagacggatctggaatggtgtctgcgtagcttggccgaggctgtacggcagatccgccgttttgaatggtcgtgggaaatggaaacgacgtggccgggagagcgccttggtagaagactgacgaagatggcttgttttaccgctcaggccagccatttctagctttcgaaaccatcacgatcgccggggcgcgcgtggggggacgaggggtcaatctcctcgctcgacgactcatcgctgacgactcgatcttggcaccgtcttcgttgtcctgcccgagagacatgagaaatggcgagtcgaagattggttgtcgagcaggtccatctttatgacgaatgcggccatctattctttcttcgtctttcggcgaggtcgggacccatttttggaacgatacctcggctgggacgttttccctttggtgaatctgttgtgtgcagggcgttgaagtgactcatgaacgcgatgcagcatgatggcggcgagacctttattacgtgatcgggacctttccccgaagcctgatcaacaaaaaacctgttccgatgggaacgcgcgccgccgcgcgctgggtgcacgtccctcccttctccaaaccaggccgagcctgttggaacgatgcaggatcagaggtttcaaaagagacaatcccatcaaaggcagccagagagaatcgtcaaatccttcttctacatctcccatcaatcacaaatcgcttgttcatcgtctcgacttcaactcccactctcctctcactctctctttgtctcttcattttcgacattgactgtcagaaagaatagcacattgatcctcttcccgacgagcagcagcagtaaccggtcttactctctctctctctcacctcccacctattctcaagcggcttatcagcgactcccgacatcgacatcgtctgtcttccatcaccttctttattgtctgaccaacgactcggctgcgccaaacaacaacaaccagcatacatactcgcttcgaaccgagaccttgtcgtcatcaacaagaaagtctccagcccttttttcgtccgaccgtttctcgtcgaccggaaa
